United States Patent Application Publication US 2022/0008368 A1 - sequence listing, part 6

SEQ ID NO: 2 - DNA, 58617616 bp, Homo sapiens (residues 10,855,116-13,026,138 of 58,617,616)
  modified_base (1)..(60000): a, c, t, g, unknown or other
  modified_base (24448981)..(24498980): a, c, t, g, unknown or other
  modified_base (24552653)..(24552752): a, c, t, g, unknown or other
  modified_base (24891257)..(24891356): a, c, t, g, unknown or other
  modified_base (24895791)..(24895890): a, c, t, g, unknown or other
  modified_base (24898314)..(24904771): a, c, t, g, unknown or other
  modified_base (24908590)..(24908689): a, c, t, g, unknown or other
  modified_base (27190875)..(27240874): a, c, t, g, unknown or other
  modified_base (58607617)..(58617616): a, c, t, g, unknown or other
caacctccaccttttgggttcaatcgattctcctgcctcagcgtcccaagtagctgggattacaggcacgtaacacctggctaatttttgtatttttagtagagacgaggtttcactatgttggccaggttgatctcgaactcctgacctcaggtgatccacccacctcagtctcccaaagggctgggattacaggcgtgagccaccgtgcccagccatctctttttttgtttgtttcttcagatggggtctctctgtgtcacccaggctggagtgcagtagcacgatctcagctcagtgcaccctccacttcccgggttcaaactattcttgtgcctcagcctctgaagtagctggaattacaggtgtgcaccacacctggctaattatttgtggggttttgttgttttttgttttgtttgtttctttttgagacagagtcttgctctgtcacccaggctggagttcagtggcgccatctcagctcactgcaacctccgcctcccgggttcaagtgattctcctgcctcagcctcctgagtaagtgggactacaggcacgtgccagcacgcctggctaattttttgtatttttagtagagacggggtttcacagtgttagccaggatggtctcgatctactgacctagtgatccacctgccttggcctcccaaagtgtggggattacaggcgtgagccactgcgcctggccaattatttatatttttaatatagacagaatttccctgtgttggctaggctggtcttgagcccctggcctcaagtaatccacctgcctcagcctcccaaagtgttgggattacaggcatgaatcaccgcacctggcctaagatatctatcctatgcaatgctagccagaggagtaaacctcttttcccagtggtaccaccaaagtcccagagttagctctcattggctccacttgggttacatgctcatcctgaaccaatcacaatagccaggagcgggggataggctaattggccagacacaaagtttgctaagtctcttgggtccagctgcattcatgttctttggttgggggttatggggtaagggctggctactcaaaggtaacctggagagacgacactgacctgcccactctcttttctgattttcctccagtgcccacttggatcttggtgctctccctgagcctggctggtgccctcttcctccttgctgggctggtggctgttgccctggtggtcagaaaaggtaacagcacgcaaagcctggcacacaagttgccagttgacaacttctggaacgtgaagatgtgcttacactcacaactcacaccattttgttttcaggttcagtaatttgttcatcacaccccttttaaaagtatttatttatttatttattatttttcttttcagacagaggctcgctctgtcgcccaggctggagtgcagtggcacgatctcggcccactgcaacctccgccttcgaggttcaagcaattctcctgcctcagcctctcaagtagctgggattacaggcgtgcaccaccatgcctcgccaatatttgtatttttagaagagatgtggttttgccatgttgcccaagctggtctggaactcctgacctcaggtgatccgcccacctcggcctcccaaagtgctgggattataggcatgagccacagtccccggcctaaaaattttttatttggagactcagtctgtcacccaggctggagtgcaatggcaggatcatagctcgctgcatccttgacctcctgggctcaagcagttctcctgcctcagcctcccaagtagctgggaccacaggtgcgtgccaccacatgcagctaattatttatttattttttttaggacagggtcttgctgtgttgcccaggctgggtaactcctgggctcaagcaatcctcccacctcagcctcccaaaagtcctgggaccacaggcacacactaccacacctggctaatttttaaaaaatattttttgttgagatagggtcttgctatattgcccaggctggtcttgaactcctgggttcaagtgatcttcctgcctcagcctcccaaaatgctggaattacaggcatgtgccaccatgcccagccaaattatgtgtgtttgtgtgtgtgtgtatgtgtgtgggtatatatgtgtgtgtatgtatatatatatgtgtgtatatatatacatacacacacacacacatacatatatatatatatatatatatatatatttttttttttttttttttaagatggagtcttgccctgtcacccaggctggagtgcagtgaggcgatctcgactcacttgctctgttgccagcctggagtgcagtggcacaatctcgactcagtgcaacctccgcctcccaggttaaagtgattctcctgcctcagcctcccgagtagctgggactacaggtgcgtgccaccacacccagctaacttttgtatttttagtggagacagggtttcaccatgttgtccaggatggcccagcactttgggaggccgaggtgggcagatcgcgaggtcaggagtttgagaccagcctgggcaatatggtgaaaccccatctctaatgaaaacacaaaaattagccgggcgtggtggtgtgcacctgtagtcccagctacatgggagggtgaggcagaagaatcgcttgaacctgggaggcagaggttgcagtgagtcaagatcataccactgcactccagcctgggcgacagaacgagactctgtctcaaaaaacaacaaaaaaagaaagaaagaaagaaagaaagaaagaaagaaagaaaaatctgaggccttccaggctgggtggggtggcttgcctgtaatcccagcactttgaaaggccgaggcaagtggatcacttgaggtcaggagttcgagaccagtctggccaacatgacgaaccctcttctctactaaaatacaaaaatagcctggcctggtgatgcacacttgtaatcccagctactcgagaggctgaggcaggagaattgcttaaatccaggaggcagaggttgcagtgagccaagattgagccactgcactccagcctgggtgaaagaatgagactctgtctaaaaaaaaaaaaaaaaaaaaaaaaaacagaaattgccggatacaattaggaccaaaatctaacacatgctcatttcttttttgttccagttaaactcagaaatttacagaagaaaaggtgagatcatccctggagacccacagagggtggtttggggaaagaaggacacttccctggcagggtgggcactccatgccccccacaaacagcgcctcctggtgggcatgctgcgtaataggaacaggagccatttattaagtgcctcctgtgtgctggaggactgagctgggactctctgaagctggagctccttatccttatggcagccctggaaacaggcaccatgaatagccctattttacagaagagaggactgaggctcagcactcagtcacagagtgagcagtttgcccagggagaggcccttccccacacccctttacctccagctgccagaaaacggtcacaatcactctagacacccacagtcagtttctaaagaatgcccctggggttgtgcagtgcccaattgcactgtaggtgatggcccaggttcctgggcaccaggatgtcctaactggccctggcctcagtttctctcctccgagagtggggagacatcctgctgcctggagatgaaaacctgctctggggattgaatcccagcttcacctggctgtgggcctcctaaccaggagaatatatatatgtttttttttttttttttgagatggagtttcactcttgttgcccaggctggagtgcaatggcctgatctctggctcaccgcaacctctgcctcctgcgttcaagcagttctcctgcctcagcctcctgagcagctgggattacaggcatgtgccaccacacccggctaattttgtatttttagtagagacgggatttctccatgttggtccgggtggtcttgaactcccaacctcaggtgatccgcccgcctgtgcctcccaaagtgctgggattacaggcatcagccaccgtgcctggcttttatatatgtgtgtgtgtgtgtgtgtgtgtgtgtgtgtgtgtatgtgtgtgtgtatatgtgtgtgtgtgtatgtatgtgtgtgtgtgtatgtatgtgtgtgtgtgtgtgtgtatatatatatatatatatatatatatatatatatatttttttttttttttttagacggagtctcactctgtcgcccaggctggagtacagtggcgcaatctcggctcactgcaacctccgcctcctgggttcaagcgattctcctgcctcagactcctgagtagctgggactacaggcacatgccaccacacctggctaatttttgtattttttagtagagacggggtttcactgtgttgtccagtctggtcttgaactcctgacctcaagtgatccacctgcctcagcctcccaaagtgctgggattacaggcgtgagccactgcgcctggcccaagagaatttccatgtttttttcttcccccggccaaggggctgtcccacagtgtgacagctccagaaatcaggatgttactgctcttctgtggggaagacccatgggtcagtgggtggggagcaaaggctacattttgggtgtggtttggggccagggctttcccgatcaagcctcctgactcaaggggcaaccctgatccctgtcactttctcctgaattcctttgcagagatcgagaatcctgctgggcccagattaacttcgacagcacaggtctgtgcctccacactcctgactccagtggggaaaggattacacctccaaatgccatcaggcctcatcacacaccaatcaaatttcttctgtgactgcttgttccctttagggtcaaaacacaccctcgccacctcttcccctgggttctcaccttctctcctttgacttaacctaaaggtcacctcctctgggaagccttccctgactccctagacagggtctgtgcctgctacttacaggaccccaggtccgaccattcttcttacccctcggtagaaatacaattaggcggccaggcgcggtgactcacaactgtcatcccagcactttaggaggctgaggcaggcagatcacgaggtcaggaattcgagatcagcctggccaacatagtgaaaccccgtctctactaaaaatacaaaaaaattagcagggtgtggtggcggacacctgtaatcccagctacttgggaggctgaggcaaggagaatcatgtgaacctgggaggcggaggttgcagtcagctgagattgcgccactgcactctagcctgggcaacagagccagactccatctcaaaaaaaaaaaaaaaaaaaaaaaaaggccaggcgtggtggctcacgcctgtaatcccagcactttgggaggccgaggtgggcggatcacgaggtcaggagatcgagaccatcctggctaaaacagtgaaaccccatctctactaaaaatacaaaaaattaggtgggcgtggtggcgggtgcctgtagtcccagctgctcaggaggctgaggcaggagaatggcgtgaacccaggaggcagagcttgcagtgagcccagatcgcgccactgtactccagcctgggcgacagagcgagactccatctcaaaaaaaaaaaaaaaaagaaagggccaggcacggtggctcacgcctgtaatcccagcactttgggaggccaaggcaggtggatcacgaggtcaggagatcgagaccatcctggccaacatggtgaaaccctgtctctactgaaaatacaaaaattagctgggcatggtggcgtgttcctgtagtcccagctacttgggaggctgagacaggagaatcacttgaacccaggaggcagaggttgcagtgagccaagattgcgccactgcactccagcctggtgacagagtgagactccatctcaaaaaaggaagaaagaaacaaaaatgaaacaattaagtgatcattgggtgcttgcatatttcatactcatttcctctgctgaacggccagctccatggggaaaggaccatgtctatctccgggactccagggccacacttgccttccagaacatgccattctgccagcttccccaagggggcgaaaggcagccagtctgtcatgcaggatattctcttgaaggcaccccaagcagagaaatgtattctctgtacttcattcctggtccaacacacacacttattgagcacttactatgtgctaagatctgagagggtcctttcgtaaccaagacagatgtgctgtctgtccacaagcccattctccaatgggaaacagcccgtgatggcaccagactgtgtctgggacaaggcaggtggtcccctgaggaagtgatgtttttctttttttttttgagatggagtctcattgtgtcgcccaggttggagtgcagtggcacgatctcagcttactgcaacctctgcctcccgggttcaagtgattctcctgccccagcctcccgagtagctgggattacaggcacgtgccaccatgcccggctaatttttgtatttttagtagaggtagggtttcaccatgttggcctggctggtctcgaactcatgacctcaggtgatccacccacctcagcctcccaaagtgctgagattacaggcaattacaggcgtgagccaccgcccttttgttgttgttgttttttgtttgtttttgttttgaggcggagtctcactctgtcgcccaggctggagtgcggtgacgcgatctgggctcactgcaagctctgcctcctgggttcaagccattctcctgcctcagcctcctgagtagctgggactacaggcgcccgccaccacacccggctaattttttgtatttttttagtagagatgggatttcaccatgttagccaggatggtctcgatctcctgacctcgtgatctgcccgcctcagcctcctaaagtgctgggattacaggcatgagccaccgcgcccagcctgtttttttttttttttttttttgagacagagtcttgctctgtcacccagacaggaacgcagtggcgcaatcatagctcactgcagcctcgacctcctaggctgaagtgatcctcccctctcagcctcctgagtagctgggaccacaggcatacaccaccacactcagctactttttaaatttttttttctagagacaaaaaattatgttgcccaggctggtcttgaactcctgggctcaagtgatcctccctccttggccttccaaagcgttgggattacagccgtgagccacctcacctggctagaagtgatgtttaagcagagacctacaagaatgggtaatggaggccgggtgtggtggctcacacctgtaatcccagcattttgggaggccgaggcaggcagatctcttggggcaaggagttcaagaccaacctggccaacatggtgaatccctatctctactaagaatatgaaaattagctaggtgtagtggtgcatgcctgtaatcccagctattaggaggctgaggcaggacaatcacttgaacccaggaggcggaagttgcattgagccgagatcctgtcattgcactccagcctgggcaacagagtgagactccttctcaaaaacaagaaaaaaaaaatgggtgatggagcaattggaggagagcctggggaggaggaggagctggcaggtgctccttctggaaggcctgagataagacacccattttcctgagggcagtgagagatacccctaggaagactgtgtgtagaaggacttggttcactttgtagctgtgaacagttcaccgtgcagaatgggttggaaaggcgccatagaggatgctgggagatggaccccaattgcttccctgtgggctggggggcagtgcggggatggcagggagcagggaagttacaactggcccccaatcctgggttttctttctctttctgtttcagacatgtccttcgataactccctgtttaccgtctccgcggtgagtggttctttttcttggaaccggttttctgctgaccgtcctaccgggagaacggggcgggctcaaggggcaccacgaggctaagttgacctgctgtctctaagctgcgggggggctaggaaaagcccagaatcactgaacagggactcagtagtgagccgagagttggctgtgaaaaaatcccagggggtgtgttaattgaaggtggtgacgtcaggctgtcttgtggccacaggcaggcaggccccttggtggtatgtcctggcctggtcagtgctgcctttggtctcagtcatgacagcccctcagaatggtgacagaggattcagggtgacctggtggcctctcatagaggcttgtgacaatctgtgtcacaatctgtgacaggctgtggtcggtcccctctgggtataaagaaaagcatgaagttgctgggtgcggtgactcacgtctgtaatcccagcactttggaaggccgaggcgggtgtgggtcaggagtttgagaccagcctgaccaatatggtgaaacctcatctctgctaaatacaaaaaattagctgggcgtggtggtgcatgcttgtaatctcagctacttgggaggctgagacaggagaatcacttggacccaggaggtggaggtagcagtgagccaagattgaggcattgcactccagcctgggccacaagagcaaaactccatctaaaacaaacaaacagataaaaatgaaaaagtacaaatgccaaggctaccccaaaatgtagctgtgcagagagtcccatagacccaggtttaaatcccagccctgacactgtgtgacaatggggaacaatatcccccaaaagcagagggagggatttgttttttttcaagacagagtctagctctgtcgcccaggctggagcacagtggtgtgatctcggctcacacaacttccgactcccgggttcaagcaattctcatgcctcagcctcccgggcagctgggattacaggcacatgctaccacacccagctgatttttgtatttttagtagagacgggggtttcaccatgctggccaggctggtctcaaactcctgacctcaggtgatccactgggattacaggtgtgagccaccatgctggctggctgcggaagctgctttagacaggagatcaggaaagtctgagatgggtgacaagcaggaggtggggaagattggggatgattgatccaggctgaggacacatttttggcacagcccagtaagctggggtggagtgaggagtcgaaggggaccccatgaagaactttgattttactgctattgagctgggatcccggaagggttcctagtataggagggaggggaccggattcaggtgcacacaggcgccctctggtggcttctgcaggaggacagatttggggaaagcggggatcagtggaaggcaggagcctggagactgaagagctgggccaagcgtgcaccaaagggtgggtggtttggtccaaaatgttggcagtggagttcgaagaagtgatcagatgcaggttaggggagatataggggagagaaaacacagagctgatttttgatgagggggccaagggagaagagggaggccaaggagggtgaggcttggagggtcaggagtgtggagtcagccacctcaacccatggcgcctgggagcagatggagaggggagtctacagttcaggagagaggtcagttctagagatagactaggagtgcctgggatacagatggtaggaaggaagggggcttggcacgggcctgtgcagccctctgaggtctctgcttccagaataaatcctgaggccataagaaaaacccggcaggcagggctcaatctaaacgtttccatgagaatccacaccgcacagaacaccagcctggtgatgccccctctccccactttttgaggtagtttttatttatttttgtttgttttttgagatggagtcttgctctgtcacccaggctggagtgcagtggcttgatctcactgcaacctccacctcctggattcaagcgattctcctgcctcagcttcccgagtagctgggattacaggcgcctgccatcgcgcccggctaatttttgtatttttagtagagacgggttttcatcatgttggccaggctggtctccaacaaccgacctcaggtgatccgcccgccttggcctcccaaagtgctgggattacaggcatgagccaccatgcccggccttttatttgtttttttactttttttttcttaaattaaggaccaggcgtggtggctcatgcctgtaatcccatcactttaagaggccgaggtgggaagattgcttgagcctgggaggttgagtctgcagtgagctatgattgcatcactgcactccagcctgggtgacagagcaagactttgtctcaaacaaacaaaaaatttccgtatgaaaagcattcacatgtcaaaatatacaataaagttttcttactaagccatgcctcttcatccattggtattcctttctgcagacatacaggtaaccactgttagcagctgcacgtggcaaatacacgcagaagtggatctgtaccttcacccaccacccccgccaatttttttttgagacagggtcttgctctgtctcccacgctggagtgcaggggcaccatcatagctcactgcagccttgatcacctgggctcaaaagatcctccagcctcagcctcccgagtagctgggaccacagacttccaccaccatgcccagctagtttatttttatatatatatttatttatttatttttcttcctttttatttttaaattttattttattaattttttgagatggagttttgctctttcgcccaggctggagtaaagggatgtcatgatcttggctcactgcaacctccccccctgggttcaagtgattctcctgcctcagcctcccaagtagctgggattataggtgcctgccaccatgcctggctaatttttttttttttttgagacggactctcgctctgtcaccaggctggagtgcagtggtgccatcttggctcactgcaacctcaacctcccaggttcaagcgattctcctgccgagtagctgggattacaggcgagcgccagcatgcccagctaattttttttttttttttttttgtatttttagtagaagcggagtttctccatgtttgtcaggctagtctcgaactcctgacctcaaatgatccacctgcctcagcctcccaaagtgctgggattacaggcgtgagccaccaggcccggccttttttttaagatacagtttcactttgttgcctagtctggagtgcagtggtacgatcttggcttgctgcacccaggttcaagcaattctcatgtctcagcttcccgagtagcttggattacaggcacatgccaccgcggctggctaaagtttttttttttggagacggagtttcgcaattatcgtccaggctggagtgcagtggtgccatctgcagcctccacttctggggttgaagcgattctcccacctcagcctcccaagtagctgggactgtaggtgcctgataccacacctagctaatgtttgtatttttagtagatacagggtttcaccatgttggcctggctcgtcttgaactcctgacctcaggtgatccacccacctcaacctcccaaagtgttgggattataagcatgagccactgcacccagcctaatttttgtataatttttgtatatttttagtagagacaaggtttcaccaagttggccaggctggtctcagactcctgacctcaagtgatctgcccgcctcggcctcccaaagtgctggggttacaggcatgagccaccgtgcccggcccagaaatttctcatcctcccaaacttgtctccgtgcaacacccactccccgttgtccctcccccagcccctggcacccaccattctcctgtctctgtggatttgcctcttctggacatctcatggatatgagatcacatgatatttttccttttgtgactggcctgtttcgctgagcttgatgtcctcaaggttcattcatgccatacgtagcctgtgtcagaatgtccttcatggcaggcacggtagcacatgcctataatgccagcactttgggaggccaaggcgggcagatcacctgaggttgggaattcgagactagcctgaccaacacggagaaaccccatctctactaaaactacaaaaaaaaaaaaaaaaaattagccgggcatggtggcacatgcctgtaataccagctactcgggaggcttaggcaggagaatcacttgaacccaggaggcggagttgctgtgagctgagatcacgccattgcattccagcctgggcaacaagagcgaaactccatctcagaaaaaaaaaaggaagaacattctttttttttttttttttttttttttttttgagacagtgtctcactctgtcgcccagactgcagtgcagtggtgtgatctcggctcactgccacctctgcctcccagcctccagcgattctcctgcctcagcttcccaagtagctgggattacaggcgcctgccaccatgcccggctaatttttgtagttttagtagagatggggtttcaccatgttggccaggctggtcttgaactcctgacctcaggtgatccgcccgcctcgacctcccaaagtgctgggattacaggtgtgagccaccgtgcccagcctgttcttcctttttaaggctgaatcatattgtgttgtatggatacaccaagttttgttgatccattcaattgttgatggacacttgggttgtttccaccttttggctgttgtgcagaaccgtgccatgaccatgggtatgcaaatttcttttggagtctctgctttcacttctagtttccttttgaagccttatactgctttgtcgttggctgaaatggtaaggcagcagctgacctgtctctagctttccccattaccttgctgagtgtctgatatgcaactttgtaacaccctttcaggtgggatcgattattttctttttacgaacaaggacactgaggctgataatgggcctagggtcacccagcttgggagggacaggactgtgggtggaacccccagcctgctgtcaactgagtggctttagttctagcaaattcatctctctttaactaggatcagggtcaggagcctccaaggcagaggaggaggtagacttttgaggaatgttttgcccatgggcaaatgggaggggaggaggagataatactatttattttttatttatttatttttttgagaccaagtctcactttgttccccaggctggagaggagtggcaggatctcagctcactgcaaccttcacctcctgggttcaggtgattctcctgcctcagcctcccgagtagctgggattacaggcgtgcaccaccacacctaatttttgtatttttctgagagggtttcaccatgttggccaggctggtctcgaactcctgacctgaggtgatccacccacctcggtctcccaaagtgctgggattacaggcgtgagccactgggcccaacagaggagataatatgaatggttgtgttcacttagcaaagaagagcttacgatgtgccatttgctttatcagttttactcttttaagcctcatagcagccctaggaagtggtgggtactagcattctgcccgttttgcagaaggggaaactgaggtatagaggggtgaagccacacaactgaggttacactgctataaagtgaaggaactggtgtttgaatccatgctctctggtccccagtttagcagagaggaaggcaggagaagggaagaccaggacaggtgggtgtgggtgggggcgggatgagaggagacctgctgggctggcagagtctcaggctcagaacatggagaaaccctagatcctgaaaccccaaatcacccacttctgtgtttcttcttacatggacaaagaaaacgatgccagaagaagacccggccaccttggatgatcactcaggcaccactgccacccccagcaactccaggacccggaagaggcccacttccacgtcctcctcgcctgagacccccgaattcagcactttccgggcctgccagtgaggctgaggactgggggacccctctgtctccaggcattcgggggcctgaggtccctccagctacttctgggggggctctgtcagccactttctcagggaattggacagaggaaaggaaggggaaccctggccttgggattttcatcacagaggagtgggagaggggacacaggcatgggcctggcactatacagacaacaggaagttcccctctcgaccttcggctcctcaggaccaccagagaaggagatgtcaggaccccttcttgtcccccagctgggccataagacgtcccaggtctctgcacacccgtggaattcctcccttccccagtgggtttttgagcatagggtgcccttgggtgtgttgtgtgtctgcctgctggcttgcttaagttattaattataacacgggtcaaggtgttcccaggcctctatggagtggaatccttcaagctggggacctctggatcccatggttggatggctggggggtggagcgtgtctgaattcaccaaatttgaagcatctctcaagggcagtcagggtggtgtatgcggagcctcctgggggtgtggggagtgcagcagtgccatgccagggtctctgcaacggtacttgcattagagggtttaggaggtggaatgacaggggctacgggtgagggacatgaaggagaatgagggcccctcgcagtggctcacacctataatcccagcactttgggaggccgaggcagggggttgcttgagcccaggaggttgaggctgcagtaagctatgatggcaccactgcactctagcctgggcaacacagtgagaccctgtctcaaaaaacaaaaggggccgggcgcggtggctcatgcctgtaggcccagcactttgggatgccgaggcgggcggatcacctgaagtcaggagttcaagaccagcctgaccaacatggtgaaacctcgtctctactaaaaataaaaaattagctgggcgtggtagagcatgcctgtagtcccagctactcgggaggctgaggcaggagaatcacttgaacccgggaggcggaggttgcggtgagctgagatcgagccattgcactccagcctgggagacagagcgagactccgtctcaaagaaaaaaaaaaaaaaaaaaaaggaatgaggcgtaaatgaggtctagggaagagttaaagctggagtgctaggaagtggcccaagctcactgggtcgcccaaaagagatggggccacccaaaatgaagggggatgcagagagaagacgggtttgtgtggcgggagaggggccctgcgccgggccaggctggactcagcatcgttggaggaggggctgagagaggagggggtcaaaggatatcttgtgcgaaaggagacagtcaaacattaaggattaagaaggcaatgtgggcagagatgatggggaagggaggaggagcggtcgaatgtcggggaggggtcctttcaaccgggctcaggttgctcctggaggccagggctcatcggaaatcgtcggtgcgggggcggtggggggaagggttgggggcgaggcccgggcgctggccacgccctttcccccgcccattccccagagcggggcggctgacaaagcgagtccgggtgggagggcgcgggcaggcacgggggcggggcctcgtcgcggctgggccacgcctccctgagggctgcctcacaaagccgggcgggcccgggggggtggggcccagtctcaggggcgtgtccaggtcggggcagggaagccgcatcacgacgcgcggctgcttgtgtggggcggggtacagggcgtgtccacgcggccgagcaccgcccccgccgtccccgcaccgcctcactcgaaagcagccgttaatgaggcgccggcctgggggcggggcccaggcctccgaggggcgtgcccgcgcgcccgagcaccgcccccgacgtaccctcccgccccgcagttcccgggcggtggagccacctcacaaagcggcgaccgttctcgcggggcggggcgtagccggtcccgccccacggggtgccctctcgttcgctcgctagctccccgcgcccaggacggccggcagagggcgctgcgccacggggccgggccgcggcgacggtggcggcggcggcggcgaggcggcgcgtggccggcaggcggcgctgcccggctcggcctcggcctgcacggcggctgcggcggcggtagcggcagcggcggcggcggcggcggcggcggcggcggcggcggcggcggcggcggcagcggcggcggcctgggcccgggcgcagcggcggcggcggcggggcctggagccggatctaagatggcagcggcggcggcggcggtggggccgggcgcgggcggcgcggggtcggcggtcccgggcggcgcggggccctgcgctaccgtgtcggtgttccccggcgcccgcctcctcaccatcggcgacgcgaacggcgagatccagcggcacgcggagcagcaggcgctgcgcctcgaggtgcgcgccggcccggactcggcgggcatcgccctctacagccgtgagtacggggccccggggcaggcgcagggccggggctgctcacgaggccggcccggggcgggggccggcggggaggggccctgagcgcgggggcctggcgtggggtccccgggactgagccggtggcctgcagggagcgaccgtggagggccggtgccaggggacagacagagaaaagagggcgtgcgtggtggccggaggggcaaggtgcccagagtgagcaagggagcgcgaaatggggagtgaagggcctgagatttgggaggggtgggtgagcaggaagtggggggctctgagtggaaggggaatttggaggacgccaggcgtggtgggcttaagcgtgggggagggaggtccggggtgcgggagaggtgggcgtctcgggggcgggcgtggccgcctctgcagggaggagggtggggcgtgggcggcccgggatccctctggggaccccctggatagctcaggacggttggaaagtgtttgctggtctggggcgcccgcgagtaccgagttccaccgctgtgcgaggtgtggcgttcaggacccccgaatgggaaacttcaggatctggggagagggcccatgcggggacggtgggagccgcagggtgagctcctcgtggaaacgtggacgggacgggccccttcctgatgccgggcttcgaagtaagagctaacagcctcctcccatcttcttttgggggatgtgagaagctggttacattttccgaagctgctttcaaaactgacatttcactggggggaaaagaaaatcacaaatgcgtttgccagcaccccccacccccgctcccagtctttgtagttcattcttcttcttgttactccttcttatctcttctctttgattccttgttcacattttgctactctgtgtcatttggctttgtctttcagggcttcttgcactgatgccctggggaacccctcaggaggcctctagctagcttgggtcctgtgtgaattttttgccactttggaaacggcccgattaaaggaaagcccgaggagcagtccgttcacactgggttttccctgcacctcgactttgaaaacgtggactaaaggagttgtgtctgctgtccgagggtgccgtctctttttgctggtgcagagcctgggtcttcttggaccagatgagaggggaaggagggtatttcagcgggggtttcagagttcaaggcagacactcagctcaacagaaccccagatcataagcaaaacctattcactgggcaagcattggtagccaactttgtcctgaacagaacaaagcggggcagcgtttccaaaactagggtcccagggcttatcctcaaaggagttccaggagagttggctatcatttttaagtaaacctttaaaaaatttttttaggaccaggcggggtagctcagcactttgggaggctaagcactttgggaggatcacttgaggtcaggagttcgagaccagcctggccaacatggtgaaaccccgtctctactaaaaatacaaaacagcggggtgtggtgacatgtgcctgtcccagctactcgggaggcagaggcaggagaatcacttgaacctgggaggcagaggttgcaatgagctgagatcgtgccattgcactccagccggggagacagagtgagactccatctcaaaaaaaaaattttttttagaacaattttagtttagtttttttttttttttttttttttttttttttttgagacagagtcttgctcggtcccccaggctgaagtgcagtggctcaatctcggctcactgcaagctctgccacctgggttcacgccattctcctgcctcagcctcccgagtagctgggactacaggcgcctgccgccatgcccggctaattttttgtgtttttagtagagacggggtttcaccatgttagccaggatggtcttgatctcctgacctcgtgatccacccgccttggcctcccaaagtgctgggattacaggcatgagccaccccgcccggccagaacaattttagtcttatagatgtattggcaacatagtgagatgttcctaccatcttattcctggagtaacattttgtgtttgtatttgtgtttttgtttttgttttgttgatactcttgaaagtattacttgttattaagacagcacttctctttgagaggtaattggtaactgaaacattttttattattagagacaaggtttcactatgtcactgtgttgcccaggctggtctccaacttctgagctcaagtgatcttcctgcctcccagaatgctgggattacaggtgtgagccaccccacctgaccggaaacattcataaaaaggagaaagtccacattcctcagagagcctcagtcccagattcccagatgatatatccttagggttctgaaataatttttttttacacttttttgttttttttctttcttttttattttttttatttttattttttattttttcagacagggcctcactctgttgctcagactggagtgcagtggtacagtctcagtctcagctcactgcagccttccatggctaaagtgatcctcatacctcagcctccctagtagctgggaccacaggcatgtgccacacccagctaatctttcatattttttgtagagaaagggttttcactgtgttggccaggctggtctcaaactcctgggctcaagtgatcctccctccttggcctcccacagtcctggaattacaggcatgagccaccgcaccgccctctttatccttaagtaacattgatatggagataaaaaacatgggttcttggccaggcgtggtggctcacacctgtaatcccagcactttgagaggttgaggcaggcgaatcacttgaggtcaggaggttgagaccagcttggccaacatggcaaaatctcgtctctgctaaaaatgcaaaaattagccaggtgtggtggtacctgcgactgtagtcccagctactccggaggatgaggtgggaggatcgcttgaaccagggaagcagaggttacagtgagctgagattgcaccactgcatgtcagcctgggtgacagagcaagaccctgtctgaaaaaaaaaaaaaaagcatgggttctggagttggaggtgatcagtgctgggtgtattaatttcccatggctgcaataacaaattatgacagatttttggtttaagacaacaggaatggattctctctcagttcatggtcagaagtctgaaatcatggtactggcagggccacaatccctggagaggttctacaggaaaatccttgcatcttccagattgcagtggatccagctgttgcttgatttgcagcagcgaaacccaagtccctgcgtctgtcttcactcctgtgtcttgtgtcctcttttttccttttttttttaaagtgagatggagtctcgccgtgttataggctggtctcgaactcctaggctcaagtgatcctcccacctcagctgttcttttcttttctttttttttttgagacggagtctggctctgtcacccaggctgaagtgcaattgcgcgatctccgcttactgcaagctctgcctcctgggttcaggccattctcctgcctcagcctcccgggtagctgggactacaggcgcccgccaccacgcccggctaattctttgtatttttagtagagacggggtttcaccgtgttagccaggatggtctccatctcctgacctcgtgatctgcccaccttggcctcccaaagtgctgggattacaggcttgagccaccgtgcccggccccagctgttcttttcttataaggacactgggcattggatttagggcccactttatatctaggatgatctcatctcaagatccttatctgcaaagaccctatttcctaataaggtcaccttcacagattccaggggttacaacttggatgtctgtcttttttttttttttgagatggaattttgcccaggctggagtgcaatggcgtgatctcggctcactgcaacctctgcctcccgggttcgagcgattcgcctgctttggcctcccaaagtcctgggattacagggattagaggcatgtgccaccatgcccggttaattttttttgtatttttagtagagatggggtttctccgtgttggtcaggctggtctcgaactcctgacctcaggtgatccgcccaccttggcctcctaaagtgctgggattacaggtgtgagccaccgccaccagcctcacatatggctaatttttaagtttcttctagcgatgcggtctcactattttgcccaggctggtcttgaactcctgggctcaagcagtcctcctgccttggcctcccaaagtgctaggattacagacgtgagccactgcgcccggccaataaatatttatgtccatgttactgacagcagtgttcgttggtgtggcatgggaatgagctagcttttctaggaggagccccctatgctccagggctgccccgctgtcttggctcaccggccatgggagggagtcctgggccatgatctgtacctaacataggaggcccaggagaggcacgtggggaggacttccagccctgttccttgacgtctgcaccctccaggggaaggatgacagctgcagaagggcctgtctctgtcactctgtagtgaacagttacttcttgccatctgaagtcaccctggcctacgtccatgagattggccaaatggcaactaccaacaccaggccattttccctgtgcagagggggaggccctttggcgtgggcttcctgggcttgaggaagctttggcatggcctctggagttcctgggcataggctgccctcccttggaaaggaggcagtttctcagggaggggtgccgggaaagagaacagaacaaactctcacttccccagccctgtggcgctctttctggaaatgactgtgtcacttttctttcttggtcagcacgagtcagtgtggccagtgctttagactctcccatccccttggctcagaagcttacacagcagcatgggctccgtcaggggctaaacttcagtttgtgaggggcatgccatggggtggaaagttcagagaaaaaccctttgtccaaagaaggtgaagaatggcctgctgtcaccgaaccaggggcccttgtgacttcctttggttacactcctgggatccccctgacagctggggcaggggtatagaagagcttgttatgtgccccatctttaggacatctcggtgtcaagctggagtgacaacagggaaagttagtaaccccagaaaggcatttgtgtttcagcggtgcctgcgtgtggctaatggataccgtcatttattgagcatttatcccgtaccagactgtgcataaacttgtgttgactcaaaatgcttgaccttgggggcagctagggaaagggcagtgatataaattaggcctatgggccacattgagcctgtggcctatttttatctgtgtttgtattttattagtgagacagagtctcactgtgttgcccaggctggagtgcaatggcatggtcttggctcactgtaacctccacctcccaggttcaagtgattctcatgcctcaccctcctgagtagctgggattacaggcctgtgccaccaccctggctaatttttgtatttttagtagagacagggtttcaccatcttggccaggctggcctcgaactcctgacctcaaataatctgcctgcctcagcctcccaaaatgctgggattacaggtgcgagccaccgcacccagcctgtgttttattatttatttattttgagatggaatctcgctctgttgcccaggctggaatgcagtggcgcaatctcggctcactgcaacctctgcctcccaggttcaagcgattctcctgtctcagcctcccgagtagctgggattacaggcacatgccgccatgcccagctaattttttgtattttagtagctcactgcagcctctaactcctgggctcaagtgatcctctggcctcatcctcccaagtagctgggactacaagcacatgtcaccacccttggctaatttaagcaatttttttagagacagagtcttgctgtgtttcccaggctggccccaaacccctggcctcaaaccatcctcctcctgcctgagcctcagaagtagctgggattatagtcacgaaccgctgggcccggtgtggcctatttttgtacagacaaagctaagaaaggcttttacagtttttgagagattgattagggaaaaaaactaaaacccaatccacaaacaacaataatcagttgagaccacagtgtcctgcaaaacctgaaatatttactcactggcccgaggcaggggaagcttgtagacccctgggataaatgaatgaggcaggcaggagttggggtctgtggggagtttggccccagccaaaagagaaaccaaaaaatcctcaggccgaatagagcatacttctgaattgtgtgagccccttgtgccaattgtggcgcttactgtatgttaccacttactctgaaaagagttctgtgaggtcagagataccaaccccaatttactggtggaaaaacagaaatgaaagaacttgactggccaaagtgatgtggttggcaggcagcagagatggctttggcattctgggtgactggatgcccaccttaaatgcatatataagtggttcagtgacatttatctgttcatcacaaagacccaaagtagcagaggcttaattaaacacgatggcattttattttttgtgctctaatgctaaagtgtgaagattgtcaggtgccaaagtctcctgggctcttggaagttcccagatccaggtcctccccccggctttttttttttttttgagatggtgtctcgctctgttgcccaggggctgcagtgcagtggtgtgatctcagctcactgcatcctctgcctcccgggttcaagcgattctcctgcctcagcctcccaagtatctgggactacaggcgtgtgccaccacggctggctaatttttgtatttttagtagagacggggtatcgccacgttggccaggctgttctcaaactcctgacctcaggtgatccacccgcctcggcctcccaaagtgctgggattacaggccactgccccaggctgatcctccaccattcttaaggtgaggtcttgtcctcaggtttcagcatgactgctggagtcccgccattacaccctggcttccagacagcaggacagaggaagggacaaaggagaaagggtgcaaaggtcacatccaggtgtttgttaagaaaggttcccggtagctgatgcaaggtgcttcagctttcattttgttggctagaatgtagtcacatgatcactgccagctgcaagggatgctgggaaatgtagttttcaatctgagcggccatgtgctcagctgaatttagggttccagtttccatggacaaagagagaacatacagggagtcaccttggccacagtgggtaggatctggacctggccagaatgttgggaaggacgtttctgggttatggagaggtgctccagtgggccagggctggagacagccacctggcttggagcacagggtcccctgtgaggagtggaggggctaaaagtggaaacagggctgggttggaatcgaggatttttttggtttttttggagatgaattctcgccctgtcacccaggctggagcacagtggctcaatgtcatctcactgcaacctctagcctcccaggttcaagtcattctcctgcatcagactcccaagtagctaggattataagtgcgtgcaaccacacccagataatttttgtatttttagtagatacgggggtctcacccttttggccaggctggtcttgaactcctgacctcaagtgatccatctgccttggcctcccaaagtcctaggattaccggcatgagtcaccgcacccagcctcaggtgaaatcttaatggaaggtgtccagtgctgtgagcagctcctggtcaccaagcactggccctctgtgtagggggtctggatgagatgggtgggcaaggcctttcaacagaagctggagtgtggtgtgaacttgctaatgactttgagatgccaagcctcacacacctcagaccaggttggatttagcaggtggagaggctcaggaagacctctgtggcaggtgtgtctcctttctgcggaaacctgctgcttctaaggtctgctggagaacctgggaggtggtgagtttgcaaagacatccagggaagcagccacttaagcgagggcaggatggaggggcccacctgggccacacctggctgcttgaggtggcgagttgaggctgggaggggtttccatcagttccatcagctcagagctaggatttttttttcttctttttttgagacagggtcttgctgtgtcacccaggctggagtgcagtgacacgatcatagctcattgcagccttgaacacccaggctcaagggattctccctccctcagcctctctacaggctgggaccacaggcgcacatcaccatgcctggctaatttttttttttttttttttttgtagagacagggtctcactatgttgctcaggcggatgtggaactcctgggctcaagcgattctcctaccttggcccccaaagtgctgggattacaggtgtgagtcatggcagccacggctccagagctcgggttcttaatctggtctgtggatggcccctgggggcggtcccatgagcccctcacaattggacacagttttgcaaaggggtaaaaggacaagaatcggtagctgtgactgtggatgagcctctgagcttcactttccctccctgaaagggggtgacagtggcacctccctggaggttttcgtggaggggaggaaacacatgtaaaatacttcaccccagttgggcacagaggctcatgcctgtaatcccaggttttgggaggccgaggcagcagggcggtttgagtccaggaatttacaaccagcccgggaaacacagtgaaactgtatctcttaaaaaataatttaaaaaaattagccggcatggtggcacatgcctctagtcccagctattccagaggctgaggcgggaggattgcttgagcccagaagcttgaggctacattgagccataatcgtaccactgcactccatcccgggaaacagggcaagaccttgtctctaaaaaaaaatgcttcttgcttgatgacttgtgatatatgaaaaggaagaaagaaaagaaaagctttgccctgtgtgcctggcccgaagtaagtgctccataaattggccgtggtgtagctgtggattctctgcacatttttctgtgcagaacctcccctgatttcggtcagcttctcagaaggatctgtgactgaaaaagggtaccagttcctggaggacagcacctgattggggagtggagtctgccctggctggtaagggattgggggctctctgcgcagggccaggacatctctccagggacaggcgagaagctttgaaagggcaggaaggagagggcagcaaggtcagatgccgtgagaggtcagagtgagagccaaggggcggtcactggatttctgagcaggaggtcacaggtgacctcagagagcagtcccctggagggctggggtgggggaggggccagccagatggcaggtcttgggggaggtgacagtggagctgcagagagagcaggggggacggtgacctttcccagcccactgagacccactctttcattcattcagccagaaacaggcagcgaaagtggactcgccgtctccatagtgcggtagctcccatccagccagcttgaaatggtcagcagaaattcaccaagcgtctgctgtgcaccagttactgttttaggagcccagggatgtggtgacacccgagataaacacaaggtcccacatttgcaggcctggggacattgtctgaggagcgctaaatcagcaatcacttaaaacaagctgaggggctccaggatgctgggggaggggctctgcttagagggaggctgagggcagagtcgtgcttgtggtaagagctctagcaggggccagctggcaagtcctgatccactccttagcatcccggtgaccactttgtgcctcagtttccttggctgtcagttgtggatcttgacatcgtctaccctagagggttgttgtgagtggcgagctgatagaagtaaagtgcttaaaatagcgtctggcactgcaggagggaagacctcctctgggaatgaacttgtgggcctggcatggccaagggcatgcagtgggggggatggggaggcaagggacgcctgtgatggaggctgggctccagccatgctgtggcccgctgtgctttcctggcggggcgatcatgggcaaatgcctcagtgtccccgaatctcagcttccttattggtgggaggattcggtgagtggcttccctggtggaaagtggccttggccagagtagacatctgtggctggactgtatacagagccctgcccaagtcggacacagccccccaatctccagtgcactctgtctttttttttttttttttttttttttgagacagggtctcactctgtcgcccaggctggaatacagtggagcgatttctgctcattgcaacctccgcctcccaggttcaagtgattcttgtgcctcagcctcctgagtctctgggactataggcatgtgacaccatgcccggctaatttttgtgtttttagtagagacggggtttcaccatgttagccaggctggcctcgaactcctaacctcaagtggatctgcccgccttggtctcccaaagtgctgggattgcagacatgagccaccgtgcccgacctcagtcttggggagcagagagaaggcagacagagaaccccatctcctctgctggggaagtggtctagggagcaccttgaagagaatggcagctaaggagaggtaggggagaggctggcctggccagagagaggtgagctgcaaaggagggggacccaggggcctgcagggtgtctgtggtcagccctgctactctctgcctttcctggctggaatgctatccctggcctcccagcactctctgggttagaggctgcaggcggtcctgattagcacacatgggagcctcaccttgggaccttgtccagggaaccgtggttctccctccagtttcctcccattaaatggagggggctttcgaggattggcccacacccaacataggtgaatccttggtctcctgagcctgctatgtggcctggaagagaagatgtatcccaagttgtccaggtgtgggggtaggtaggacacagagtagccctgggaatcctgcccaagaccccctcgtccccagtgattgaggaggagtccctttccccggtgtagtttatctgtcccaggggccttctccggcaccctctggatctgcttcctgatctcactctggggaactgcttggggagcttcacgtttcagtctcaaggatcgcgcagggcggaccctcagcagcctccagatctgcccagaaagtccacggtgccggccctgccacttctttgtttggcttaagagacagggtcttgctgtgttcctcaggccggcgtgcagtggtgcgatcatagctcactgttagccttgaaatcctgggctcaagcaatcctcctgccttagcctcctgagtagctgggactacaggtatgcgccaccacggctggctaattttttaaaaaaattggctgggagtggtggctcacgcctgtaatcccagcactttgggaggctgaggcaggtgaatcacttgaggtcaggagttcaagaccagcctggccaacatggtgaaaccccatctctactaaaaatacaaaaattagctgggcgcggtggtgtgcgcctgtaatcccagctacttgggaggctgaggcaggagaatcacttgaacccaggaggcggaggttgcagtgagccaagatcatgccactgcactccggcctgggtgacagagcgagactctgtttttttttttttttttcgttttttgttttttgtttttttaattacgggccaggtgcagtggctcacacctgtaatcccagcactttgggaggccgaggtgggcggatcacttgaggtcaggagttcgagaccagcctgaccaatgtggagaccccttctctactaaaaacacaaaaattatccaggcatggtggcgcatgcctgtaatcccagttactctggaggctgaggcaggagaatctcttgaacccaggagatggaggttgtggtgaccacagatcacacaactgcactccagcctggtcaacaagagcaaaactccgtctcaaaaaaaaaaaaaaacaaaaagacatagagatgggctctctagtatgttgtccaggccggtctcaaactcctggacataagcagtcctcccctccttggcctcccaaagatctaggattacaggcctgagtcactgtgcccagcccaacctgccactttgacactacacagctctgacttttggttgaagaatctggagtccccagttgccccccctccccctgtgcttgcctttgttccccaaaaagcagttacatgaaggaaatggagaccaggcctaacccagggctgaaggagttgggtctggagattctaggcccctcctgtgtctcctctggtgttgattctctgcatcgcttctttattttattatttttttttgagactgagtcttgctctgtcccccaggctggagtgcagtagcgtgatctcagctcactgcaacctccgcctcccgggttcaagcgattctcctccctcagcctcccgagtagctgggatcatagacacgtgccaccacgcctgcctaatttttggatttttagtagagacggggtttcacccatgttggccaggttggtctcaaactcctgacctcaggtgatccaccagccttggcctcccaaagtgctgggattacagacgtgagccatcatgcctggccgcttatttattttaattgttgtttagtcagtacacacacatgcccaggccttagttctgtttgatgcttttgacaattatggacacccatgtcaccaccacccaaagccagacatggaacttgttcccctctgggtaggtttgttcagtgggacagcccctctttccctgtctgttcctctcatcatttgtcccctgctgccaggcggggcattcttgtaaacaggtccagactgggtttggggggctctgtgcccccccacccctgccaggagaacccccttttattcttcctttttgtctgtctctttaaagcgattcattagccttggcaggcgtgggtctgagctgttttcctttatgtcgttggcaggtctttctcccgctaattgtgttctcggagctggggttcatttttgccggatgtgttacacatgtgcaagcgtagtggttttatgtatagaaaacctgcccagcggtgtgggcatgggtgctactcctggcgaggactgcagaaaggcccctggccaatcagtgctctcgtgaaagagggatgctcttgttaaccatcccgggcagggggcatgtgaataaataatcaaagactggggtgcctcttgcagactgagggagggacattccagagaatttgctgcattcttccttgaacaggacgggaaggcgaagataggctggagcttccagatttccatcctgtgcccttgagggaccctctgcaggagcctggctctgcctttgagccctggagcccctagatgcaggatgatgggatgcctggctcttactcccgctcacacactccaagtctcgctatcaggacagccccccacagggagccacagcagccacagctcactccctcattttttttttttttttttttttttttgagacagggagtgcagcggtgtgaacacagctcattgcaacctcaacctcccaggttcagttcatgctcctgcctcagcctcccgagtagctgggacggcaggtggccccacacctggctaatttttttctttctttctttctttttttttttttttttgaaatggagtttcactcttgttgcccaggctggagtgcgatggtgtgatctcagctcaccacaacctccacctcctgggttcaagtgattgtcctgcctcagcctccccagtagctgggattacgggcatgcgccaccacgcccggctaattgtgtatttttagtagagacgggttttctccatgttggtcaggctggtttcgaactcctgacctcaggtgatccacccgcctcagcctcccagcctgtagctgggattacaggcgtgagccaccgtgcccggcctaatttttgtatttcttgtagagacggggtctcaaccatgttgcctaggatgctctccaactcctgggctcatgcagtcctcccacctcgaccacccaaagtgctgggattacaggcgtgagtcaccatgccccgccccctccctcatttttatcttttatctttttttttcttttttagagatgggggctgggtgcggtggctcacgcctgtaatcccagcactttgggaggctgaggcaggtggatcacaaggtcaggagttcaagaccagcctggccaagatggtgaaaccccatccctactaaaaaatacaaaaaaaatttagccgggtgcagtggcaggcacctgtaatctcagttactctggaggctgaggcaggagaatcacttgaacctgggcagcaggagttgcagcaagccgaggtcgctccactgcactccagcctggatgatagaatgagattccatctcaaaaaaaaaaaatggggtctcaatattttgcccacgctggtctcaaactcctggcttcaaatgatcctcttgcctcagcctctcaagtagctgggcctcctgcctcagcattctgaggagctgggcctcctgcctcggtgtcccgaggagctgggcctcctgcctcggtgtcctgaggagctgggactgcaggggggcaccaccatgcccagctcactccctaatttgtataagaggaaactgaggcactaaaactttggtggcagagttgggatgtgaacccaggtttggccctgatccgttcacttggccatcagccctgcagcccctcctgccacttttcccactctctgactcctccacagggcagtgcaaggccatggaggaagtgcctgcccaaggcttacccctgctgctcctggtccttgtcctgtgtcaccgtgttggccatagcgacctcttccagagctcgccaaagccagggtcccgtctcccctggttcctgccgtgtgcctgatttctttgtggcatcagtagtgtctgcccccttcgcctgtgccacatctggaatcacatctggcgaagcagcctgcaggtcctggggcggaaggcggccttcctaacccaaacatactgttctctgagccttggtggggccagaagggctcctggagcgccctgggacctggcagagggccttcctgcagctttgtggcccaggacatcctgtgtctctggctgatggtcaaaacctttccttattctttatttttttttaaatgttttactttttgtagaagcagggtcttgctttgtcacccaggctggtctcaaactcgtggtcccaagccatctctctgccttggcctcccaaagcactgggattacaggcatgtgccagcatgctctgactcagactctttcaagaggtgcactaggcagggacttcaagtgggcctcagccccagggcagcttctccctgacccaacttcgatttcctccattggaggctgcctccgctccagcctctctggagcgcccccctgtactcccctcctctgggtgaggcccttttgccagcctgaaggcaggccccagcccagcttgctgcactgagctctctgtccttggcaatgagagccagggtgtggagggtcccagtcgctctgggagatgatccccctcagcagcctggggtcttcttgccgctccatgacacgcctcattcagcccgaccttccaggccactgtgggtgtctcctctgcaaagggcctcctgctggcctagtccccatagagagctgcagcccagctcctgccatgtgtcacaatgtgacagaccctctttagcaccaggaagcaggcttgattgcctccttgtagtggtgaggctcaggggtcaactagcctggcctggcattgcccaggcccagagcacaggtagaacctggggtcccctgagcgtggcccccagtacctcccagctggctctctggaggctgggatggaatttggctgtctttggaccagcttctgggtccccagctgagccacctggagactgtcatcgctctgttgcttggtttcccctcttaaaaataggactaaggtcgacctggagggtggtttgagcactaaccgaggccctgcacagccaacacctaagagtgcttcctggggctccataaatcacagcttcaaagtcttggcccgcgggagaagaaagactgggcgagctggcccagcagacagcatgtggagcgagggggctggtgcaggccggttttgtggctttgcaccgcgcccccaccccctaccctccacaaccccatgcttttcataattatccactaagctcccgcgctttctggggctgtggaaccccagctcacatctgctgtctcttttgtagtgcacaaagccccaggcggtggcagctgattagcatggatgcaggagacatttgcatgtaatagctcccagtgaagggggtgccccgtctctttttcagaaaagccaagctctttgtcttggccttctattcttggggttgcccttcgcacaccccacaactgagcagactgtcacccacaggtcaggactacaggggaagctgtcgacccttgaaggtggagcttagggaccagaccttagagggagccccctactgagtgccccccaggcctctgactgaagaagcttcacagtgatttatgaggtttgggtgtcctcagttcagggggctttctccagagcccacctagatggggcacgcattgagtgctctgtctcctgagatctgacctggcagtctggggcagggggaaagggcagctgccccaagtagtgcttgggggcaccatggaggccttggcctacctgagatgccaacaggacacccacagacacctctgttccgtaggtggctgcctctcagccctgcccatacaccacccagtgtcctgtcactgcgcaatttgagaatttttttttttttttttgagacagagtctccctttgtcacccaggctggagtgcaatggtgcaatctcggctcactgcaacctccgcctccccagttcaaaggattcttctgcctcagcctcccaagtagctgggattacaggtgttcaccaccatgcccggctaatttttttttttttttttttgtatttttagtagagacggggtttctccaagttggccaggctggtctcgaactcctggcctcaggtgatccgcctgcctcagcctcccaaagtgctgggattacaggcgtgagctaccatgcctggcccagaattgtttattaccttctgtaatcctacattcttggggactcctgaagtagattcaacactttgactttgtgagttgccaatgcatttccaagcccggatccaaccgtggaccctggccttttgggccagcagaagaggtggctgttttttctcatgaaatatttttgaaggaatgaagacgaatgcagccaacacctgtgcacttcccaccctcattttaaggaaaccttgcccatggaatgaagccccccatccaatcccctccccagggaacagctttatactaactctggtggtcggcttttggaggggccataaatggcctgaaaagctaacctgtaacctgtaaagcttaaactttacaggtgggatgtaaatgttgaggcgggaggatcgcctaaggctgggagtttgagaccagcgtgggcaacatagcaagaccccatctctacagaaaaataaaaaattagccttccatggtggtgcatgcaagcctggggtcccaggtactcaggtggctgaggcaggtggattgcttgagcccaggagtttgagaccagcctgggcaacatagggagaccctgtctctacaaaaaatataaaaattaggtggtttttttgttttttgttttgtttgtttttttttttttttgagacagagtttcgctcttgttgtccaggctggagtgcagtggcgcgatcttggctcactgcaacctccgcctcccgggttcaagtgattctcctgtcttagcctcccaagtagctgggattacaggcgcccaccactacacctggctaatttttgtatttttagtagagatggggttttaccatgttggccagactggtttcaaactcctgacctcgggtgatccacctgcctcggcctcccaaagtgctgggattacaggtgtgagccaccccaccgcgcctagcctaaaaattagttttgtgtggtggtacatacctgtggtcccagctactttgttttatttacatatatatatgtatatgtatatacgtatatatgtgtatacgtatatacatatatacacacatatatacacacacatatatacacatgaatatatagacacatatatacacatgcatatacacacacacatatacacacacacatatatatatatatatatatatttttttttttttttttttttttttcttggtatagctctatccttcctgaagtcccagctccttaggaggcggaggtgggaggattgcttcttgagcacaggaggtcgaggctgcagtgtgctatgactgggcgggccattgcactccagcctgggtgacagagggagaccaaaactgagtcagtgttcccaagcagtgtgtgaagctgattctctgtcagccacgtgccagatgggttgggtcccaggggtggccacctgggggacagggccagacacttgttctgggcccaatatggccttgtgtccagaactctctcggtggctccttctctcgaccctttgccttgagccggagcactgtggggacacaggaaccaagactggtgttttgtgccaatgccacactactgtgtgcccgtgggtcttgggccgggcatgggtgggttcgtcctcatggctacacagtgaaccatgtgttattttatttttctagacactaaagctgaggtgtcgggaggtgatggtcccttgcttgcaggtggcagagctcaggttcaaacctggatcttactgcacctggctcgtttgggaggcctcccttgctggaatgcaggtcagggagccccgatgcccttgggctgactgccccacgtccatcacacccactgagggccgtggggtgggtgcagggcttgttctgggagattccaagctgaggaaagcagggctgtccgccagcctccagctgggtcacagaagaggctcagggcctgttcccactcccctcccccagccagcagggtccaaaaggatgttgggggggtggtccccagtccggcctgcccactctagggaggggcccagataacttgcgtagacgccggccctcccgcccccagccttcgccattgccttttgtctggctatctttcatgtacaagggagaaattcaagccactcaggagggtgtaacatgaaaagtcagtctctccttctctccgcactgcccgtgacctgtggtttctcaggcacatacaagcgcgcacgcataaatctctcctccaacctgctgggcttcaagttatgcacgttcacacaatggcaaaggagggtgcggattgaaaagtatgacttgcttcccggaggcagcactgaagtcactttattgtgtttccagacaagccccatgaatgcagtgtgcactgcccctcctccctctgtcccttccccgcccatctgtacacctgtggtgcgtaggttttacaccactctgtgccttacgttgtggctcgatcatttaacatgtcagtgtgtaccgatggaaattgatctcttttaatttgccacatcttcatttattcattctttgattaattgatggatatttaggttttctgctttgggggcattcagatccaggtgtatctctgcaagtagagcttgtagcatacataaggccctgcaaagggatttctgggccggaagtttttgatcagttgctcagacatagttctgatgtgctggggaagtgcccgttcagggccatggctgcagggctcctggacacccagctccggtgctggagtggggttgggattcgcccagaggccagggctgcgccagaggagcccagggtgacctcatggtcctcagatacccggggctgggcagcacagtggaacagctgctccagagcttctccgaggacgacatcggaggatccgactcaggttacggcaggagagggaggccaggccgggttagggttctggggtttgggattctcttccgaggctggcattgatctgttgctgatgatggtaacagcagctgctcttgtttatgaagtacttaacacctccagctccctccattacctaggaatcctcactgcagggaggggttttcatccccattttgtgcctattttatttatattattttattttttgaggcagggttttgctcttgttgcccaggctggagtgctatggcacgatttctgctcactgcaacctctgcctcctgggttgaagtgattctgctgcctcagcctcttgagtagctgggattacaggtgcccgccaccatgtctggctaattttttgtatttttcggtaaagatggggtttcaccatgttggccaggctggtctcaaactcctgacctcaggtgatccacccgcctcagcctcccaaagtggtgggattacaggcgtgagccaacactcccggccctgcccattttatttatttatttttatttttatttttttcagatggagctttgctctttttgcccaggttggagtggaatgcaacctctgcctcccaggttcaagtgattctcctgccttagcctcccgagttgctgggattacaggcatgtaccaccatgcctggctaattttatattttgagtagagacggggtttcaccatgttggccaggctggtctcgagctcctgacctcacatgatccacctgcttcggcctcccatagtgctgggattacaggcgtgagccactgcccccactgtgcctattttatttcattttgagacagagtcttactctctcccccaggttggagtgcagtggtgcgatctcggctcactgcaacctccacctcctggcttcaagtgattctcctgcctcagcctcctgagtagctgggactacaggcacccgctaccacgcccggctaattttttttatttttagtagagataggttttcaccgtgttagccaggatggtctcgatctcctgaccttgtgacccgcctgccttggcctcccaaagggctgagattacaggcgtgagccaccgccccctgtcattgtgcccattttatagatggggctcctgaggccaggggtgaaggcaggtgctagttcgggggatccaagccctgccagactctgctgcatgtgggctctgacctagtgaagttccaggatggtgccctggggccgggctgtcaggccctccacgtgggttatgtcacctcaccctttgggatgtgtcagggtggtggttgaacagatgaggaagccaaggccagggctggagaacagtgggttcggccctgaacccagtccctccttgataaacctaagtcctccttgatgccaaagcccatcctttcagccatctccctgctgggtgaccctagggtcatctctgccgcctcttgggcacatgggtgccaagccacacaggaatggggggaagcttctggttcccagtttggaaacaaggtcacctctgccagggcagtggggcctggctcaggtgtcgcctcctcccgagtctgcctggaatctgaattgggcctggtccgcatgcatcagcttccgtgctttccctcctctcagcgcttactgccagttcctgttgtccgtctcctcactgccctgctgggtgctgtctgcctcccactgtggactcccagcatgggagggccgggggtggctctctggttcaccgccaggtcctctgtgcctgcatgtggtccgggcagagcaggctgagcagagatgccagctgagtgggcttcagaaagcgtgtttttttttccgtgcctgtgggatgggagttggccacggggggtcggggtgtctccctctttttacctaactctcctcctttgatcgggaatattttcctctggaaggtgaagagcccatgttgtctttggcagcaggaggcgatttaatacaagacgtaccatttggacaacggcttctacagctaccagctactcccccgccccaggtttgccgagataaatagctttaattattcctccatttggtggctacagttgtgttccccctggagatgcaagagcttgaaatgtggcctttctcccccgagctgctgctgcttttcttcttgccctccacctccttgtgttttttttttttttctctctctctctttttttttttcttcttgaaatggggtctcactctgtcgcccaggctggagtgcagtggcacgatctcagctcactgcagccttgacctcccaggctcaagggattttcctgccacaacttcccacatggttgggactacaggtgcgcatcaccatgcccagctaatttttttattattatttgtagaagatggggtctcactgtgttacccaggctggtctcaaactcctgggctcaagtgatcctccccgctcagctttccaaagtgttaggattacaggcgggagccactgttcccagccggcctccttattctctatctgccaaagaatgtggccctgatgtcacgacagcatgggaggttctctttttttttctttttgagagagtctcgctctatcacccaggctggagggcagtggcgtgatttctgctcactgcaacctccgcctcccaggttcaaattattctcgtgcctcagcctcccaagtagctgggattacaggtgcccaccaccactcctggctgatttttgtatttttggtagagatgaggtttcaccatgttggccggactagtctcaaactcctggcctcaagcgatccacgtgccttggcctcccaaagtgctgggattacaggcgcaagccactgtgcctggcctagggatgggaggtttgaagggactccaggtccccctgacccaggtctaacgagcctcaagggcccaaagaccccctgcttgttccgttgctttctggaagcaagggggaggggaaggaggtgaacaaatagtgctgctgtgtggccacctgatgctaaacatctctgcgtggtgaagccacttccccaatcaaggccatgcgcacagtgagggcaggctagcactccaacttggacacctagacccctgaacccactgccccctgtgcttagggaagaggctgggctgcccctgcccctatcccggggagggcattctggtcagtacccatgagtgccccttgtgtgctaggtactgtgtgggtcatgcccagagccctggatctgcgctttgtggggctgtcaggtaggcattaaataatgagctgccaggcagtgagggcttgtccgggaaatgctggaggacctctaggaggaggtgacaaggaagcaggggaagaggggagggtgatctctaaggagcatcagaggccagagagaacctctgcccatgatcttgaccgggagagagtgttgaaggccagcgaggtttggctggagtgacccagggggcagcagtgagactgcagacattggcagggggctggttccggaaggtgctggggaaccgtggggcggtgtgaagcaggcgggttgtgttagacactgtgcggcttgaagggtggactgggaggtgactgaggcatggtatgtcgcccggcaccatctgctcagtgagacccttgagagacgtctccccgttcttccaagaccctcctgcatgctgggacccagggctgccgtggagctgcttgctgccccacccaccattctctagtgtattttcttcaagtctggggctagggaatccttataccttagagtcccccagattctgctgccctggggggccaataaggaggggatgtgcagcatgctgactctaaggcaggtggggaacagcagccagtccaccaagagctgccctcttccccatccccattgcctcctgcctggccagccatagcacttggctccttccctatcctgtgtgacggtgggtctctccccaccctgcgcaagatccctcccagtgctgcccagagccaagccaccagtccactggggcctcttgcagtccctccacagcgcccctacccacatcaacccacgtttcttggaggtctgtcccagtagcctcccagggctcaccacactgtctgggccacccctgtttccctgcgttcctgcactcttccccttactggcatatctgtccccagtctccttcccaggctgggtcaggtgccacctccaggcacctacagagtccaccacttggggatctctgtcagtctgccactcggctgtcctcaccgcctctaggatggggagtgtgtctccattgccgagtgcctagtgagcagatagggaagtgggtggcgaggatgctgagggtccagcctctgctctgcacctgtaatccttccgggttttgcaaatgaagctttatgggcacacagccatgctcatttgtttacatattgtctgctgcaaggcagaatagaatcattgtagcagagatcagattccccagcagagatcagattccccaggaagcacacaatatttactgtctggtcctttacacagaaagtcagccaaggcctgctctaggaagcgcagagacattgggtggtgcattggtgaggaatagggatgctggtgccagtcacctcggccactcttgctgtgtgaccttgagcaagacacttaacctctctgagcaaataagggcatagtgagagtagatactcccagaagtgatgagaagaggaaacaggaggtcgacataaggcaccggaacagagcctggctgttagagtgttgtcactcttatgtcatgtgacatcccagcctctgcagggtgtgggcaggcctggctcatggcagctgggggtttgtgacctggattcacatggtggagggctgcttcctgggaagcaagaaaggctgcctcaaagatggggcaatttttctacccccttccctgcagttccagcccctcctcccttggccccagagcttcatcagggccgactgcagtgtggcaggccagcgagtagccccaggctgggtccaggggtggccaaagcgtaacactcagtccgggtttgtgttctttacgttccccgttggagactccacctggagatcccagtccctttccttttactgcagggtaaagaaatgctagctctgggccgggcacggtggctcacaccggtgatctcagcactttgggaggtcgaggtgggtgaatcacctgagatcaggagtttgagatcagcctggtcaacgaggtgaaaccctgtctctaggctggatgcggtggctcactcctgtaatcccagcactttgggaggctgaggcaggcggatcacgaggtcaggagatcgagaccatcctggctaacacggtgaaaccccgtctctacaaaaaatacaaaaaaaattagccgggcgaggtggcgggcgcctgtagtcccagctactcgggaggctgaggcaggagaatggcgtgaaccccagggagtggagcctgcagtgagccaagattgcgccactgcactccagcctgggagacagcgagactccgtctcaaaaaaaagaaaaaaaaaaaaagaaaccctgtctctaataaaaatacaaaaattagccaggtgtggtggtgcatgcctgtaatcccagctactcgggaggctgagacaggagaatcgctggaacctgggagatggaggttacggtgagctgagattttgccactgcactccagtctaggcgacagagtgagacttagtctcaaaaaaaaaagataccccagctgtggcctggcctcaattggcctgaactcaccacggcctcctggctctagagtctgctttttggtcacccttgcctgctagccctgcagcctgtcccccacctctccaggccatgtgcacacagtccccaacatgcgccggctgatgccgcaacagtggtgctttttggatttgtctctagaggccaacacagagggcctttctgaatcctggggtcctgcccccttccgcggctcccatactgctcctccccagctgaatggccgctttgggaggtggttgctggccttgagaggatgccacagtgagtttcctgcgggcagggctgcatctgtggcgagcactgaatcgccactgctggatccagatgcctgtgcgtcccgggccccaaggctcccttctaccctcctcctggggtgctgttcgcaagccaggagacaggctgtgcattccctgcctactcagaggtgaccctgggccaggtgtgcgatggcccactggacccatagtagcagagggaggggagaggaagggagaaagtgggaacagcatgtgcagaggcctggggcctggcccatgtagggactagagggttgagtgtgtccatggggaggggccaagacggggagagccatgaggaatgatgggcacagagctcagaggctcgggagtctcctgaacaaagagaggaacacggcttagcttgttttttttttttttttttttggtttgtcagtatttcccaggtgtcttctgtgtgccagggactaacttggggataaagctgtgactttgagaagctgccggctccgcgggctttagcagctgctgctgtgatgaagcgatccacttgccctcagccccggcatctttggcccaagcccagccctagccctggctgggcacagccaggcttcacttggccacaggtcctgtagttgcctgcctggcgccaggtcagagagggacgcctcaggcaacatcgggttgccaggctgcttggtaaacaggcctccctgggcccacttgctgtcgcccaggtgtggctaacagatcgacagtatctcctgccccaggacgggtatgagtgtgggcaccatgccaaggttggatgtcccttcctgggacccacccacagctgggagcactttatcttgggcctctgtgggtgtagtgaggctgtgagtctggggcagtggcctgctgacaccctcctggcagggctcaggaggttcctccatgccctgccctcaggagggcggcacctggctcctggggtgggagagagtctggcaggactggctgggtgtggccggggagctgcccttcaggtctcatatctgtaggccctcatacctggactcgtcagttaggaacagttttctttttctttttctttttttttttttttgagacggagtctcactctgtcgtccaggctggagtgcagtggtgccatctcggctcactgcaacctccacctcccgggttcaagcgattctcctgcctcagcctcctgagtagctgggattacaggcacccgccatcatgccttgctaatttttgtatttttagtaaagacggggttttgccatgttggacaggtgtgtctcaaactcctgggttcaagtgatccgcccacctcccaaagtgctggaattacaggcgtgagccaccacgcctggcccatttttcattttctattgaaacaaaattcacacctgtaatcccagcactttggaggccaaggtgagaggatcacttgagccccaggagtttcagactagcctgggcaacatagtgagaccctcatttctacaaaaaaataaacaaaattagccaggggtggtggcatgtgcgtgaggttccagctacccgggaggctgaggtgggaggatgtcttgagcctgggaggtcaagagctgttgtttcataacatgaaattagcccttttacaatgttgcataacaatcacctctatctactcccaaaatatgtttgtcaccccaaaaggagaccccacatccattaagcagttgctccccattcctgccttctcccagctctcagccaccagcagtgtgccttctgtgactatttcatataaatagaatcatttgtgtctggcttctttcggcatgatgtttctgctattcattcatgttgcagcatggctcagtgcttcctttatttttatggctgaataatgtttcattttatagataagccatatttgtttatctgtttgtcagtttatggacatttgggttgtatttctatcttgtgtctgtcgtgaataagtactgctgtgaatgcttgcatacgagtgtctgttggttttttttgctttgttttgtttttatttttatttttttgagatgagtctggctctgtcgcccaggctggggtgcagtggcgtgatctcggctcaccgcaagctccgcctcccaggttcctgccattctcctgcctcagcctcccgagtagctgggactacaggcacccgtcaccacacccggctaattttttgtatttttagtagagacggggtttcaccgtgttagccaggatggtctcgatctcctgaccttgtgatccacccgcctcggccccccaaagtgctgggattacaggtgtgagccactgcacccggactttttttttttttttctgaagcggagtctcactctgttgcccaagctaaagtgcagtggcgctatctcagctcactgcaacctccacctccctgattcaagcaattctccctgtctcagcttcctgagtagctgggactacaggcacccaccatcatgtctggctaatttttgtgtttttagtagagacggcattttgccatgttgaccaggctggtcttgaactcctgacctcaggtgatctgcctgcctcggcctcccaaagtgctgggattacaggcatgagccactgcacttggccagctttttgtttgtttgtttgtttttgtttttgtttttttaaagaggtggagtcttgctatgttgcccaggctggagtgcagtggctgttcacaggcagtcatagctaactgcaaccttgagctcccgggctcaagcaatccttccacctcagcctcccgagtagctgggatctcaggcatgcaccaccatgcccggctaattttgtttatttttttgtagcgatagagatggggtcttactatgttgcccaggctgaccttgaactcctggcctcaagttatcctcccatcttggcctcccaaagtgctgggattacaggcatgagcctgtgcctggccctggctatctctttgttgttgagttaaaaaagttcttggcccagcccagtggctcatgcctgtaatcccagcactttgagatgccgaggcggacagatcacacgaggctaggacttcaaaaccagcctggccaacatgacaaaaccccgtctctaccaaaaatacagaaattactgggtgtgatgatgcatgtctgtaatcccagctactcaggaggctgaggcataagaatcgcttgaacgcagctactcaggaggcagaggttgcagtgagccaagatagtgctgctgcactccagcctgggcaacagatcaagaatctgtctcaagaaaatatataggccgggcacagtggctcacctctgtaatcccagcactttgggacgccgaggcagacagagcgcttgagctcaggagctcaagaccagcctgaccaacatggtgaaactccatctctacgaaaactacaaaaataagctggacgtggtggtgcacacctgtagtcccccagctactcgggaggctgaggcaggagaatccctagaatctgggaggcagaggtcacagcaagccaaaattgtgccactgcattccaggctgggtgatggagtgagactccatctcaaaaaataaatataataaaaatagatacaaaataattgttgtttctttttttttttttttttttttgagacggagtcttactctgttgcccaggctggagtacagtggtgtgatcttggctcactgcaagctccacctcccgggttcacaccattctcctgcctcagcctcctgagtagctgggactataggcacttgccactatgcccagctaattttgttttgttttgttttgttgtatttttagtagacacagggtttcactgtgttagccagcatggtcttgatctcctgacctcgtgatccacccatcttgccctcccaaagtgctgggattacaggcgtgagccactgtgcccagactttttttttttttttttgagacatgctcttattcttgtcacccaggctagagtgcagcgttgccatctctgctcactgcagtgtcaacttcctgggctcaggtgattctcccacctcagcctcccaagtaattgggactacaggcgcatgccactacaccgactaatatttttatatttttagtagagacgggatttcaccatgttgcccaggctggtctcaaactcctgggttctagtaatctgcctgactcccaaagtactgggattacaggtgtcagccaccatgcctgaccctaaaatagttttttatatattctggacactaaatacttaacaatagatgatttgcaaatagttctcctaagagttttcttgttttagctcttatatttaggtcattgctccatttgagttctgttttgtttgtatatggtgtgaggtaggggtttaacttcattcttttctctgtggttatccagttttctcaacagtgtttgttgaagacactattctttccccattgaatgttcttggcatccttatcaaaaatcaattgaggataagtataagggtttatttctggactctgattctgttccattgatctgtgtctcctttcttttgccagtaccactacactgttttcattactgtaccttcgtagtaaaatttgaaattgagacatgggaatcctccaacttcattctttttcaagactgttttggctattcagggtgattgagaacactttgccatatttgcactcatgttgttgttgttatgatgggctattcaaaagcaagctactgacatcatgggaatttgccataaatacttccgcatatgttttctaagaaaatatgcatttctctacaaaaccacaataccattgtcacatccaaataacttaaaattatggaatatgtagtccacactcacatttccctagttgtctttttttttttttttaataggatctcacgtctgttgcctagactagagtgcagtggcaccatcatacctcactacagcctcaacctcctgggctcaagcgatcctcccacctcagcctcccaagtagctaggaccacaggtgtgagccactctgtccagctccccagttgtcctttatttatttttttgagacaaggtcttgctctgtcacccaggctggaatgcagtggcacagtcatgactcactgtagcctcagcctcctgagtccctaagacaacaggcgcatgccaccatgcctgcctaatttttaaatttttttgtagagatggggtcttgctatgctgcccaggctgatctccagctcctgggttcaagtgatcctcctgccttggcctcccaaagtgctgggattagaggtgtgggcccagcctccccagttgtcctgtataacttttaaaaacatttttcgtttggctccagcccagggtcccactttgcattgcattgggcactcccctctttcttgtctcctgcactctggaatagctcccaccgttttggtctttcctgacattggcctgttcaaggagaccaggctggttgtcctgtagcctgccccacaacttgtccttttctgttgtcccttgaagatgagactagggcaaacatttttgccaagaatactacagatgatgcacctgtcccactgcagtatggcaggcaggggcacagtgcctgattgggctggcccgttcctggcatcgctaagtttcaccatttggctggagtggagtggctgcaggtttgtggaatgaatgactggtaacagctatcatgatgggtacagggagacagtgtcctaattcactagaccactgccccgccattagccccatctgatggtgagaaccccagttccagagaggctgagggacatgcctgtgtcacagtgaacaaatggcatggatggggtgtgaacccagcggtctgactccactggccacatgcagtcactgctctgcgcccatccaagaacagaagggctcagccgagcagggcagaggcagctccagctctgagttcctgtgggccagcaccatgccttgtggccctgtctgcccacctcagccttcaccatgcccgtctcagccctgatcatcctgaggacacaggctgtgttcctgctgtctgatcagtcgctcccttgtcttccatgtgggctgggcagtcagggcacccggcaatgctgccagggtggttttgtggcactctggaagaatctgggggcaccaaggggaggcagcaggagggcgacagggacccaggctcaaaagaaggcagctgacagggctgcaccgctcacgccagcctgtcttctctcgtagatgaagatgtgtgtgtctttaagtgctcagtgtcccgagagacagagtgcagccgtgtgggcaagcagtccttcatcatcaccctgggctgcaacagcgtcctcatccagttcgccacacccaacggtacgtggccctccttccattccggtgacaccagcccaaagcgcccagagccctggtgggcaggggcgtagagcctggctgaggggtggcccgtgcatccttaagaaggctccactgccctcaaaaccacattcccacatgcaggtatgcccagaatacactctggcctgggcagaccctggatcccagaccctccctcaccggctcctccgggtcttttggggcttggcttctatgtccccacctccaagaggcccatcctgaccacctgggaccagtctttctggcagtggccagccctgggccagctgtgactgggccagctgtggatggagtgaggcgaggtcctagaggcaggaagagtttgctcagggcgcagagaagccaccagaagggcttaaccaacccaccttgggggcacaggtggacacaagattcctgactaggggtgggagaaccccaggtggatgcagccagggtagcagagaggtgtccaggaatgcccagggctggagatggtctgaaggtcccaccgcaggcttggttaccagagacctgaagtgagtccagtggttgacacaggtgctggtgcgaggacagctggaggtggagaggctgcgtgcccatgagccactgccggcctcccccttgtctcaaggtagctgtgcagtgacccagatgtaccttgggcagcctgagccctcggggccagctgtgtgaagctgccatgcctggctaattttttgtagagatgggttttcactgtgttgcccaggctggtcttgaactcctggcctcaagtgagccacctgcctcagcctcccaaagtgctgggattacagatgtgagccaccgtgcccggccccttttttttttttttttttttttttgagaaagagtgtcactctgttgcccaggctggagttcagtggtgctatcttagctcactgcaacctccacctcccgggttcaaggcgattcttatgcctcagcctcccgcgtagctgggactacacgtgtgtgccaccgtgcctggctaatttttgtgtttttaatatagtagacatggagtttttcatattgcccaggctggtctcaaactcctggcctcaagtgatccacccgcctcagcctcccaacgtgctgggattacaggcatgagccactgcacccggccgttcccactcttaagactatttgtattttaatattttttatttcagttctgtcagtttttaaaagttgtgctaaaatctacataacaaaatgtgatcattttaacccttttgaagtgtgtaggttggtagcaagcagcacattaacattgttgtgcaactgtcactaccgcccatctccagaacttgctcatcccgaactgtgtcttttcattgtttttgagacggagtctcgctctgtcacccaggctggagtgctggagtgcagtggcgcgatctcggctcaccgcaacctccatctcccaggttcaagcgattctcctgcctcagcgccctgagtagccgggattacaggcacgtgccactgtacccagataattttttgtatttttagtagagacgggggtttcaccatgttggccaggctggtcttgaactcctgacctcaggtaatccgcctgcctccgcctcccaaagtgctaggattacatgcgtgagcaaccatgcctgaccgtgtcttttaatttttaaagagattgtcttttaaatattgttttgttttttacttgatataatttagtggctattattctatgttaataaatatagctttattttattttattttattttattttattttattttattttattttattttattttattttgagacagagtctcactctgttgcccaggctggagtgcagtcacacaatcttggctcactgcaacctccacctcccgggttcaagtgattctcccacctcagcctcctgagtagctgggattacaggtgcccgccaccacccctggctaatttctgtatttttaatagagacagggtttcaccatgttggccaggctggtctcgaactcctgacctcaagtgatccactcgcctcagcctcccaaagtgctaggattacaggcataagccaccgtgcccggcttattatttcttgtagagacagggtcttgctatgttgcccaggctggcctcttaaactgggctcaagcagtccacccgcctcagcctcccaatgtgctgggattacagttgagaaccactgtccccagccaaatagatagagcctgctttaaagggccacataccattgcatctctgggaagggtggtgattggtgattctctgccatgcttttcttaattttttatttcatgtttttgtttttgttttttaacgaggcagggtcttgttatgttgctcaggctggtctggaactcctgacagctgatctgcccacctcagcctcccacctcagcctcccaaagtgctgggattacaggcatgagccactgcacctggcctctactgtgcttttctgtgcccctggcatttgtccagtcccctcttactggacattgcagtgtctgctgcccccacacagatgctgccctgagcttctgggtggacttgggcttatttgccagagctttgactcctgggccggtgggcgtgtgcttgagagagcttcaccaagctgccctttggtgaggaatccccaggcccactcccaccagacagcagccccacatgcaggctacctgccctcttctcatgtcagtcaccacagtgcaggcatggctgcccttcatcttttctttgaactttgaaaattgtttttcggggaagagaaatcaccagccctgtatgttcaagggagaaacgtcaggacatacggccatccagaaccttccctcccagatggccacatgctgggttgctgaccgccccccggtgacttggcttccctgttccagatttctgttccttctacaacatcctgaaaacctgccggggccacaccctggagcggtctgtgttcagcgagcggacggaggagtcttctgccgtgcagtacttccaggtgggttgtactccccctcagccaggccgcctccccccggcagcccccctgccactcacccgcaggaggccacacagcacagggaaggcccacccaagttcccgtcctggctctgtcccttactggccatgtagccttgggcaggtttcctctgctggctgggcctcagtttcctcatctgtgaagcggagatgcaggtgcctgcctgagagggttgctggaaggatctgagcacaggtggagctcagggccacaggcgttgtgaataacggtagagcagttacaatgccctgagcgctccctgcatgccaggccctggtctaagcgctgtcacatgcacagaagcacttggaccctcccaacaacgctaggaggtaagtgctattattgtccccattttacagatgagaaaactgaggctcagagaggttaagtgacttgctccaagtcacacagctatatgcaacagagccaagatgggaagccaggtctgcctgatgccaaagtctgtgcccctgcccaggtgccacgctgcctcccgatcgcccgttgtcttacagagagacaccacacctcacctgcctggcgctctgagttctagggctctgttcgatctgcttctcttcttctttggggccctcaagatgaggcaggtggcccccgatgccagaaccctgcctgtggcaaatcttgagttctcctgggcggcttccaggtccaggcggcatcagctgttgccatcggctgcagtgatagtggcggtgtcctcctgggggctgccctccggcttcctgctccctctcctggagctgctagtggggcccaggcagagggtgcacgacctcccgagggaggtttgtgccctagatggccccttgctctatcacagggctggccagggccttggctgcctcgtgccaccatgtgccccgtgccatcggtatgtctctgttccagttttatggctacctgtcccagcagcagaacatgatgcaggactacgtgcggacaggcacctaccagcgcgccatcctgcaaaaccacaccgacttcaaggacaaggtgagtggcccgcgcatgtgcccacctctctgcttctgtctcggttttttttttctttgctcattgattttatctttaattttctcagattagaaatgcatttatctcagttactgcagaggctgaggcaggaggatcgcttcagtccatgagtttgaggctgcagtaagctatgattctgccactgcactccagcctgggcgacagagcgagactcttgtctcttaaaaaaaaacaaataaacaaggccaggcgcggtggctcacgcctgtaatcccagcactttgggacgcccaggcgggcgggtcacaaggtcaggagatcgagaccatcctggctaacacgatgaaaccccgtctctactaaaaaatacaaaaaaattagttgggcgtggtggtgggcgcctgtagtcccagctactcaggaggctgaggcaggtgaatggcatgaacgcaggaggcagagcttgcagtgagctgagatcgcgccactgcactgcagcctgggcaacagagtgagactccatctcaaaaaacaaacaaacaaacaaaaaaaacaaaaagcaagaaaaacaaatgcatttgatatataaactcaacacagcatgtacattataggcttgagaggcctctatcagttccctccaagatagccgctacccctcagtatgaggtctcttcttcaagatttttccccatacagacatcagcgtatattttacaattattttattgagctgggcagagtagctcacacctgtctgtaatcccagcactttgggaggccaaggcagggggatcatttgagcccaggaagttgaaactgcggtgagctgtgattggggtactgctctccaggctgagccaaagtgcgagaccctgcctcaaaaacaaaataaataagctttttgatatcaccaaataatgtgcactcatgattaaagagagagagaacagagcagaacgtctgtattcaaaagtagaaatcggccaggcacagtggctcacacctgtaatcccagcactttgggaggctgaggcaggtggatcacttgaggttagcagttcgagaccaccctggccaacatggcaaaagcccatttctactaaaataaaatacaaaaattagctgggcgtggtggcaggcacctgtagtcccagctactcaggaggctgaggcaggagaatcacttgaacctgggaggcggaggttgcagtgagccgagattgtgccactgcactccagcctgggcaagagagcaagactccgtcttaaaaaaaaaaagtagaaatgtataatgtattcccttctcatcccatttgccagagtttttggtgtctaccttttttatttttttatttttacttttttttttatgagatggagtcttgctttgttaccaggctggagtgcagtgacacaatctcggctcactgcaacctccgcctcccgggttcaagcaattctcctgcctcagcctcctgagtagctgggactacaggcgcacaccaccaagcccagcagatttttgtatttttggtagagacagggtttcaccatgttggccaggatggtctagatctcttgacctcatgatccacccacctcagcctcccaaagtgcttggattacaggcatgagccactgcacccggcttactcagaatttttgttttctctttctgtttttggggggttttttgagacagattctcactctgtcacccaggctggaatgcagtggcacaatctcagctcactgcagcctctgcctcctgggttcaagcgatttttgtgcctcagccggccaagtagctgggattacagtcatgtgccaccatgcccggctaatttttgtatttttagtagagatggggttctgccatgttgcccaggctggtctcaaacttctggcctcaagcagttcatccgcctcagcctcccaaagtgctgagattacaggtgtgagccgccgcacctggcctgttttctcttttgaatcaaatgggagcctgtttttttcctccaagtattttggggatctctccacgtggatctgcatggatctgcctcatccagcgcctgggtcacgcccccctagcatcgcttaccgtcccagaggatggtaggccttgggccctggggaggagttgtcttgacacaagagtgtctgccctggcagggccatcccgagcctcctcctggccactgaggtctgggaaggacgtcctccgttggtgaagtcccttcctgctccccaaggatggagatccatttcctggttcatctggagctctgatcagtaccctgaggccttcccacctgaccccagcttcccctgcaggcactcaccatgcccagagcatttgtccttcaaaagctcatgcctgtcaccaccaggaatgtctgtccttggtctgctcgtgtggaagcaatcccacaaatccagaacaggtggtgtgttctcccagaccctggcctggactctgccatgagtgaccaccacgggccagtagccctgcggggagcccagccggccccagggcttgggcggctcacctgccccagccaagacgggctgcttctccaggcatgagtcagcatggagctgggagacactgccaccaacaactcgggcccctttcctccatgctagaactgcggaggccccggaaaaatgcttttcaactgccagtgagcttccaggggaggcccgtgccactcaccccagacgatccggaggcctgcaggccacagggttggggccgagcgggagcttccccagggcttctcctcccggaggactggcccatggctcatcttgagttctcgcttcattttgaccaagagcccataaagggcaaacattgagagtgaagacagacgcctcatgatgtgcacatcccttatgatcactgtcacctccccatcaccgtcgcctcctatgtctcgctctcacctcccactcctccctcagatcgttcttgatgttggctgtggctctgggatcctgtcgttttttgccgcccaagctggagcacggaaaatctacgcggtggaggccagcaccatggcccagcacgctgaggtcagtggcccgctggtgcccacccagcctcgtcctcgcccatgagtgccatgccggccccagcctagagaagcttgggaacccccaggggcctggggacattacttctgtgctttggtctctttattgtccccaagacagtcatttcagggaggggcttcagggcctgagatgattttctctcatggccggtagtcagggccacatgtcatttccctgttttcttttttttttttttgcactgaaaccttcattcacaaagttcaaaacataaaagctaaaaaagagcagacagcgtgctctccttccccaccccagctcccacccccagccccatcatgagagaggagctacggccacaaagtctgagcagagctattccgtgagcgtcctctcgcaccagtggaggctgcaccctccattccctgctctgcctctcccatggatctggggtcgccggggtcgtggaggggccatctttgttctgtcttgccgccgcagagcacccctgtgcccagccgtgccgctgttgctttagctgcattgtgtccgcagcgacactcagactccttccaggtcttcacgtggccaacgctgctgtcctgagcccctctcccacatgcggttgtgtctgtaggacacaccctagccctggaatcgctgggttgggggtgcatccagctttagctttggtggctgttgtgatgtctgctcgtccccctctttgcagccaccagcagttgtcgacgcagggtgggggacctaggaggccgcagcaggggacggccctgaggcagggccggggtcacagtgaactctctttttttttggggggggtctcactctgttgctcaggcttgagtgcagtggtgcgatcctggctcattgcaacctccacctcccgggttcaagtgattctcctgtctcaggctcctgaatagctgggatccaccactgcaactggctaatttttgtatttttaggccaggcatggtggctcacacctgtaatcccagcactttgggaggcttaggtgggcggatcacctgaggtcaagagttcgagaccagcctgaccaacgtggcaaaaccccattagccaggcgtggtggtgggtgcctgtagtcccagctactcgggaggctgaggtgggagaatcgctagaacccgggaggcagaggttgcagtgagccgagatggcgccactaccacctccagcctgggcaacagagtgagaatctgtctcaaagaaaaaaaaaatagttttttttttttggtatttttagtagagacagggtttctccatgttggtcaggctagtctcccaacttatgaggtcaagcagtccgcctgcctcggcctcccaaagtgctgggattacaggcatgaggcaccgtgcccggcccacagtgagctcttaacaggctatggccaatcgcagccatggttggggcgccagcgaagcaggcagaggggcacccaatgcccatgtgtggatggaggctgtcccttgagagcaggtctagggagggccccatggcaggaagacgcagggaagcccacatggccctgcccgcctgcaggtcttggtgaagagtaacaacctgacggaccgcatcgtggtcatcccgggcaaggtggaggaggtgtcactccccgagcaggtggacatcatcatctcggagcccatgggctacatgctcttcaacgagcgcatgctggagagctacctccacgccaagaagtacctgaagcccagcggtgagcactggggggtacacaggccaggcccctcggtggaggccctggctgccgctgagccaggccatcagtgcttcagctccctgcttactgtcggtggcccggggtgtagggaagcctgggcttttcccccgctcccaccccaaccccactccagccagctgtggcttttggagccctgggccccaaacacggccagacacccagctgcccactcgcccagacagggtacacaggatctcctggcacctctgccgtcccatgtcctgctcctgcgggacagcctctggctgggagtggggattgggacaggttctgtggtcagcagttccccaacaagccctgctctcctcacagtccaggaggtggggtgggcgagcatgtgtgcaaatgcaggggtgtgggtgcgagtgtacgtgtgtgaggaggtgaggtagctgtctggcaagcccatctgtcacttcccatccgtgcctctgggtatggcctctggtcactgggtgactgtttctttttttgagacagagtttcactcttgttgccaaggctggagtgcagtggtgcgatctcggctcactgcaacctgcacctccccagttcaagcaatttttgtgcttcagcctcctgagtagctgggattacaggtgtgcaccaccacgcccagctaagttttgtatttttagtagagatggggtttcaccgtgttggtcaggctggtcacgaactcctgacctcaggtgatctacccgcctcagcctcccaaagtgttgggattataggcatgagccactgtgcctggcctgggtgactgtttctatttgcccatctgtcttggggtctgtgcagccctgacgcctgaggcatgtgcctgtggctcttctcatgctaggtatgtgagcgtctgagcatttctgtacaggcaagcagctgtgtgtgcgtgtggcagggtacaggtccccagccagggtagcagccatgggatggagcgtgggcagcagcaggctggtggggcttgtgcaggcaggggcaggggggaagcttccactctcatctctggcccgccctggatccaggccctagggtcctggctggctgtgctcctggaggtgggaggtggcgtcccacagctgtgtctcatgtcttgggtgtgagtatgggaagcaaggctgctccaggggctgtgggccccactctcctccccttctgccctgatggtggggatgggggtggggacagccccagcagagagggcccctcccgatgggacatgaagccagatggcagtcaggctctgtgggcagctgcatgtgcccccgacgtcccagcagccagcttgcagggaggggggaggccaggcctgtgcaaggaggactcctgtccagctcaggaagctcttccaggggttaaaggcagccctcccctctcccagtcacatgtcttctggtcagcaggagccagaggttccttccaggctgggtcacttcccatggtgcccccaggtcccccagggcagaagccgcagcatgtgcatctccctccccgttccagcagctgcagccctgcagctctcgcctcgggtacagcctggtggcgtaaggaggaggcagagtcccactgatacctcaggatctcctcccccagcttgcaaggctggggggcccacatctggaggccaggtgctccttggggcaggcggggctgcggggccctgatcctccctgccactggccctgactcatgcgtctacccttgagtcacagagggaggccctgcccttccctcagtctgtgtgcccagaccaggcaggccaagtggcccatcctgccggctgggtgcctgtgccagaacctaggcagtccctgtggtgtggatttggcttcccccacctggctcttggcctcaactgaggtccccagcggcgttggggtagcccggggcccaccaccctccctctgtccagagcaactttgctatgctttcccggctgcacacatgcacagacggcagggcctgagaggcagcgcctggccacatcccgggcactgcctgcttccccgtgagtctttggcaggtccctcacacctgccaggtctagtaataggacataaagatgagccaccagcctcccagtctcaggtggaattcgtgagctggtgcaggtcaggtacccgtggtggtgatgaaacactgatcagaataggcgctcggtgccactgtcacaggagtgcaggaacgaatggatgacaggctgggagcacccagggttgggggtcttggggtcctttggaagctctgccaggcagtgtgggatgtgtcacctgacgccagcacccctccctgccccactcccaggaaacatgtttcctaccattggtgacgtccaccttgcacccttcacggatgaacagctctacatggagcagttcaccaaggccaacttctggtgagtgtgccctgggtgtcccgcctgggccccacagcctgccttctcagggacagccccagctccccagagagcctgcactcctctttttctgaaagacttgggctagatgagggctgactgggagagaaggcagggctaccccacctgcctcttctgcagccctgaccttgctgtgggggtggggcctgtccacaggtaccagccatctttccatggagtggacctgtcggccctccgaggtgccgcggtggatgagtatttccggcagcctgtggtggtgagtagggcctccagggtactgctgcagtgatcacttgccattgctgtgcagctgtgcagccctcaggaagctacagcccctctctgagccctctcctctgccctgcacagcgctctcacagagatttgggccaaaagtgtcaatgcatgtagacacttagcacacagcacacatgcaatacatgtggaacattattaggtgaggctaaggcagagggggcatttaggctcaggagttcaagatcagcctgggcaacacagagacgccatcgctatttttaaaattaaaataaataaataataaaaataaaaaagaaccattactagatgaatttatccttggtgagctgatgtgatttattgattgattttacttgagatttttgatacatagatccatgatttaaaaatcaaaaggaaaaaaaagctaggtgcagtgggtcacacctgtaatcccagcactttgggaggccaaggcgggcagatcacgaggttaggagattgagaccaacacggtgaaaccccatctctactaaaaatacaaaaaattagccagacgtggtggcgggcgcctgtagtcccagctactcaggaggctgaggcaggagaatggcgtgaacccgggaggcagagcttgcagtgagccgagatcgcaccactgcactccagcctgggcgacagagtgagactccgtctcaaaaaaaaagaaaaaaaggttccattttattctgttttccccctgctcttgatgtttttcattcgttttgggagactcttggactatcttggatactatctctttaaacactacgtctgccccattctttctccttctgggattccaattacgtgtacagtgaaccttttcaccatatctcagatgattgttatactcttttctgtcttttccatccatttttttctctcattttctttttctttttttttttttttttgagacggagtcttgctctgttgcccaggctggagtgctgtggcatgatgtcagctcactgcaacctccactttccgggctcaagcgattctcagactcctgagtagctgggagtacaggcgcttgccaccactcccagctagttttttgtaattttagtagagatggggtttcgccatgttggccaggctggtctgaaactcctgaccttaggtgatccgcctgcctcggcctcccaaagtgctgggattacaggcgtgagccaccatgcccagcgtgttcagtcttttgtgatatcactggggagtgaatgagtgaaaaaagcaggaaatattttggtggtattatgcaaattttgtattatgatgagggtgccttggaagaggccacagtttgagaaggtgctgctttatggtacagcctttggtaatgttaatgcaagtccagtggttagcctcattaccaatatgctgctgaaccacccgttagcttttattgttttttgaaacaggatctcactctgttccccaggctggagtacagtggctcaatcacttcatggcttacttcagcctcgatctcccagacgcaagtgatcctcctgcctcagcttcccaagtagctggaactataggagtgtgccaccatgcccggctaatttatttttttgtagatatggggcctcactgtgttactcaggctggtcttgaactcctgacctcaggtgatccgtccgcctcggcctcccaaagtgctgggattataggcataagccactgcacctggcgttgagcctcttattagcggctttctgcttggtgtcttagcctctgatgccctgcctcgctcaaagctcaggagttggccaatttcacaagcgcactgagtgtgcaccgcccaccttgccctcctgcacttatttccctttgctttgacatcacagccccttgaatccgagctgccttggtaaccctgagctcccattttgctttccccacccaaggaagctgctgaaaggtcgaggtggccgttttctgccctccccatggggaaaaggtagaggccagaaagggctccctccagaaagggcatttccctcctttccaggagcttgatccccaaaatcctggccgctctggttggtcaccagtgcttccaacaactggtttattcttttctttggattttattcggtttacatagttcatggcaggtgtgttagtcggatataaacattgctgggagtggacagcagcactagtgttgttgttgtttttaagagacagggtctccctgtgtttcccaggcttgattcacactctcgggcttaagcgatcctcctgcctcagcctcctgagtagctggagttacaggcatacaattccacacccagctagcacctagttctttaacttgcttttttggttaacttgcttaatgatttagcttggagatctttcctcatctgttcataaagagcctcttcattctttctcacgtccgcatggtctttgatgggagagccatcactggtttaattagatggtttccagtgtgtcgctaccacggacaatctaattatacatgtaagtttgttgatgtgttcatgtatctggaggttaaactcctgtagtgccaaatcttttatgtggataaacacttgtcatttggagagctgtcacctgattgccctcggtggcgttgtgccggtcccctcctcacggcgtgtctgggaagagcaagctcgttttagctgcacagcctagaagccgtgggcagacctgggggaaggggcagggctctcccctcccatgctggccctggcgtcagatgccacgtcacacctgtggtctctcccaggacacatttgacatccggatcctgatggccaagtctgtcaagtacacggtgaacttcttagaagccaaagaaggagatttgcacaggtactggcacccacactccatcctcccaggcctggctcaggccgaaggtcagggccacccctggctcccgccggcatcctgccgtcccagggcagatggtgggcgggggccccaggcctctgcacctggcaccccctcttctctctcggcagcgcctgtctggcttccccagcagccactgccctttgccttccaggatagaaatcccattcaaattccacatgctgcattcagggctggtccacggcctggctttctggtttgacgttgctttcatcggctccatgtgagtgccgcagagcagcccatgctgcctcctccccactcccagggcttcctgcagctgcaacctggctgggggggtggaacatggctccaggttccaccatcccttccaatgggagtgagagcctgtctcggagcaagagactgttgtgggtggggtgtgtgtgtgtgtgtgtgtatgtgtgtgtgtgtcctgtgttcccagtgtctgtccctcatgggtctgtgtctgtctcttggcacatgtcagggtgagtagggatctcgtggttgcgggcccctcgtgtgtacatgtatgcctgctcatgtttgtgtctgggactgcctgggggccagcctgtctctgctccagggtcccaggggtccctggcagagggggcaggtgcttggggaggactcaaggcatacaaggtggtggctccagtggtggcgccggcccagtcaagtatgtgcctgtccctgctccacagaatgaccgtgtggctgtccacagccccgacagagcccctgacccactggtaccaggtgcggtgcctgttccagtcaccactgttcgccaaggcaggggacacgctctcagggacatgtctgcttattgccaacaaaaggtgcgactgctccctggggctggtggtggtgggcaggggtccatctgcccagcagctcatgccacggcctgcaccctgtccgcagacagagctacgacatcagtattgtggcccaggtggaccagaccggctccaagtccagtaacctcctggatctgaaaaaccccttctttaggtaggaggggccccttgcctgcacaggggggcgccccggccctgcaacccccttgcccctgcccatggctctgtctctgccatagatacacgggcacaacgccctcacccccacccggctcccactacacatctccctcggaaaacatgtggaacacgggcagcacctacaacctcagcagcgggatggccgtggcaggtgagcagggcccaccccaatgcccagccaacccgggaggccgccctcgccgcaggcctggcccctctgcctccagccctgacgtctccctctctggacacagggatgccgaccgcctatgacttgagcagtgttattgccagtggctccagcgtgggccacaacaacctgattcctttaggtgagtgtcccccagggccaggggcagcagggagccatgcccaggactgcccaggggccgggaagggcctgtggtgaccagggtcggcctctgcttggtcctttcaccttttcctcttcctgggggctctcggccgaggctctccgtcctctctgcctcgctctgcagcctgctgctgtgcatgggctgggtggctgggggcggtgacgccgtctcccttccttctttcctccctctcgctgcgcagccaacacggggattgtcaatcacacccactcccggatgggctccataatgagcacggggattgtccaaggtaacgagggtggcgggggcagggcccgtgggggccgagctagcgtgtgagtcgccatcctctgtccggccgcccgcctgccctcttgcctgccctttctctctctctgtgactctgcctgggggctgggcgggccagggcagcccctcactgccattgcctgctccacagggtcctccggcgcccagggcagtggtggtggcagcacgagtgcccactatgcagtcaacagccagttcaccatgggcggccccgccatctccatggcgtcgcccatgtccatcccgaccaacaccatgcactacgggagctaggggcccgccccgcggactgacagcaccaggaaaccaaatgatgtccctgcccgccgcccccgccgggcggctttcccccttgtactggagaagctcgaacacccggtcacagctctctttgctatgggaactgggacacttttttacacgatgttgccgccgtccccaccctaacccccacctcccggccctgagcgtgtgtcgctgccatattttacacaaaatcatgttgtgggagccctcgtcccccctcctgcccgctctaccctgacctgggcttgtcatctgctggaacaggcgccatggggcctgccagccctgcctgccaggtcccttagcacctgtccccctgcctgtctccagtgggaaggtagcctggccaggcggggcctccccttcgacgaccaggcctcggtcacaacggacgtgacatgctgctttttttaattttatttttttatgaaaagaaccagtgtcaatccgcagaccctctgtgaagccaggccggccgggccgagccagcagcccctctccctagactcagaggcgccgcggggaggggtggccccgccgaggcttcaggggccccctccccaccaaagggttcacctcacacttgaatgtacaacccaccccactgtcgggaaggcctccgtcctcggcccctgcctcttgctgctgtcctgtccccgagcccctgcaggtccccccccgcccccccactcaagagttagagcaggtggctgcaggccttgggcccggagggaaggccactgccggccacttggggcagacacagacacctcaaggatctgtcacggaaggcgtcctttttccttgtagctaacgttaggcctgagtagctcccctccatccttgtagacgctccagtccctactactgtgacggcatttccatccctcccctgcccgggaagggaccttgcagggacctctccctccaaaaaaagaaaaaaagaaaaagaaagaaaaaataaatgaggaaacgtgttgcagcacaggcagttttcttctccttctgctcccctgtttctcatacccccaaactcagatgctggagctcaggcccgccgtgtgtgcacccaggcaggagcgggcgctgtccaggctgggccgcccccttggctctccctcctgttccaggggagccataggagggaaagcaggtggcccgggggggatatgggggccccagccctgtcccaaagctccctgctcggctgcccctcgcccgcctttatataaattctctgaatcacctttgcatagaaaataaaagtgtttgctttgtaagaaaagtctggaaagtagcagaatcatctcaaggtgtcaaaggagccttcagtcatcgtctggggggcaggacaggcagaggggttggtccacttaggtgttgcctgaaagaaagaattgtctgggagtggccccagaacctctcgccttgactgggagtgggagggcagcccccttagcccagctgggaatagtccttacctgtgggacccgggccttcctaggagggggccagggactgcggcaaggtaggggacagcgcgatgtttgagggcagagatgtgatttggggtggaggagccacgttctccggaggcagcgactggaagaagtacaactgcacaagacccctggggtcagaggcagggccagcccatgcccccctagcccctcggccccacctgtggccaccccagacccgtaccttacagcccatggccaggagggcgtggagcagcacgaccacggacagcagcactgtggccaccagcctggtgtcctcacggaccacgggccagagggtgaataccagcccggcggctgacaggcccagggccagcgccccaaagagccactgcagccaaggcacagggatgagccacaggacctgggagcaacacggcggcaggtgaccatgccagtccccccagccaccacccactctgcaccaggccaccctcaccaccatgggaatgaggcggcaggtgaccatgccagtgtccccacacagccaccacccactccgcgccaggccacactcaccaccatggggatgaagacaaagagggagtagccgtagatgcacacagtctccaggaaggtgtagggccccatgcgctcctggacacccttgcgccaccgcaggaagccccacagggccaggggcaccagccacgcatagcagtagatgctgatgcctgccacggtcactggggggggcaaggtgagcagtcaccccctgtaccccagggccctgccaggcattgggcctgcccgtctgcttacccttgtggaactgggggctgtagtggatggaggggtccctcctctgggccagcaccagcgtcaggttgccagtgacggccaggacaaaggccaacgtggcacagatccagaaggggcctgggggtagggggcacagtcagggtcccgggccctgcactcccaggacaagcagacatgtatcctgactgagctgtgctgagaccccagcctcttcctaagcaccttgcctgactcaccaggacaccgggggcctcctggtggctgagcccagtgctggctgtcagttcatccccctccccgaaacactcaggactgcacacccttggcctgtgtctcacctcattggtgccaattcctcaacccctgtcacctcctctttgactctctgaccccttcagccatggggagcagccaggcccagttcttggccccttccatgtctgcgttcacccatagtatgacctccttcaagcccagggccttatgcctcctctagagcccagggctctgccctgagcactgcaggctccagttcaagctcccgggtgggcatctccggcttcatccacacccttgccctctgccctcactgccaagctggtcccgtggatacgtggcaactctatccatcccgttagtccaggcagaaatccctagagcctgcctccgctcctaacctcccactccccccacccccacctatctagccacaaagccagtctcttctacttccccagcacgttccagaatccagtgccactctccacatccacagtccccaccatgtggccgcctccaccccagcctcctggcttccgccctcgccactcatgatggcgagagggaccccgaaaacacttaaagatccattctcggccagataacagtgactcacacctgtaattccagcacttaggaggccgaggcgggtggatcacctgaggtcaggagtttgagaccagcctggctaacacggtgaaactccgtccctaataaaaatataaaaatcagccgggcatggtggcacgtgcctgtaatcccagccactcaggaggctgaagcaggagaatcgcttgaatgcgggaggggaagattgcagtgagctgagatcacatcactgcactccagcctgggtgacagagtgagactctgtctcaaaaaaaaaaaaaaaagatctcttcttgccacagcatgggaggcttgtgtgatctgtcccctcgcctgtgacctccctgcagctcactcgctccagtggtaatgccgccctgcagttcatgcaagttcctgccatgaagcttacgtcgtttctggaagcctcttttcctaggtctcccccacccctcctgttgccaacaaggctcattccctcaccctcctcagggaggcctgccctgctgcaccctgcagaactgcagggccactcctcctgtctgctctgctgctctctacccgccaccctctgcagtccttcatgtctctgtctccctgaacagcaggtaagtcacactgtctgagtgactgatttgtccgcagctatacactggcatctgcaactcaggccacacttgttgagtgatccatcaaggaaccaaatgcacaacctcactcaccatacagatccggccgattccgcagatggtgccgcacaaagttgtggccaggccggggcagcagtgagcctttgatccggtccaggacctgggggcaaggccaaggtcaaggatggaagtctgccaggagcttctcccttgtcctgagaggctccttccctgctgacctccacccttctctttccatgccccacctgaaagaactcagcctttccctctctttttttttttttttttttttgagacagagtcttgctctgtcggccaggctggatggagtagtggcatgatctcggctcactgcaacctctgcctcccgagctcaagcaattctcctacctcagccacccgagtagctgggattacaggcgtgtgccaccacgcctggctaatagttgtatttttaatagagacgggatttcaccatgttggccaggctggtctcgaactcctgacctcaggtaatccacccacctcggcctcccaaagtactgggattacaggcgtgagccaccgttcccagccccctcttttttttccctctttttttttttgttttgagacggagtctcgctctgtcacccaggctggagtgcagtggtgccatctcggctcactgcaagctccgcctcctgggttcacaccattctcctgcctcagcctcccaaagagcagggactacaggcgcccaccaccacccccggctaattttttgtatttttagtagagatggggtttcaccgtgttagccaggatggtctcgatctcctgacctcatgatcctcccaccttggcctcccaaagtgctgggattacaggcgtgagccaccgcacccggcctcagcaccccctttttctttttgagacagagtctcactctgttcaggctggagtgcagtggcacgatcttggctcactaccacctccgcctcccaggttcaagtgattctcgagcctcagactcctgagtagctgggactacaggtgtgtgccaccatgcctggctaatttttgtatttttagtagagatggggtttcaccgcgttggccaggctggtctccaactcctgacctcaagtgatccaccgcctcggcatcccaaagtgctaggattacaggcgccgaccactgcacttggctaatttttctattttattttattttttatttaattttattttatttatcttattttatttttgagacagagtctcattctttttgcccaggctggagtgcactggcacgatcttggctcactgcaacctccgcctggcggattcaagcgattctcctgcctcagcctccagagtagctgggattacaggcgcccaccacaaagcccggctaattttgttgtatttttagtagagacggggtttcaccatgtttggccaggctggtctcaaactcctgacctcaggtgatccacccacccaggcctctcaaagtgctgggattacaggcatgagccaccccgcacccggcagtttttgtatttttggtagagacggggtttccccatgttagccaggctggtcttgaactcctcaggttatctgcccacctcggcccccttaagtgctgggattacaggcaggagccactgcgcccagtccatctttggtcttctgcatatgctgttccctgtgcctggaacatatactcctgcttccctaccctattccccagggaagccttctgtctcctttaggtctcagccaattcctcacctcccccaggaggcctttctctaacccaccagattgtgtgtgtcccctgtgttcccatagtcccgatccataaccagtcccaccataaccctttgagagcaccacagttcgttcaccagcacccaccatcaccagcaccctgcccaggggaagagtggctgaaccctgagcataactctgagccccatcccacctgcctccccagcctgacctgtgaggtgtccacgtcaaagaagctctgatagtagctgaaggtccagaatcccggctgctgctgctgctgctgctcctgcaggagctgcacattgcgggcattcagtgcctgcccggagagcctgggtcagctgggggctgcaaggaggcaggacacagggactcaccgcggccttgtcactctcctcctccacctcatcctcggctccatagctgccacctgagcccacggccacagccacgtgcccttgtggggtcagctgatcgcttctgctggtggtggctgcatctggggtgtcagccagaagattagtggcctcctcgaattctgtggaggaggtatatgggacacacgcacgtttgaggggtggaaagaactcgactgggcccaagctaaaccgatgctcatctgggggcggaggctctgctgagccattgatctcccccaaggtggggcccaacttcctcagtttggaggcatccggaggacatctgttcccttcctcctaaagtggaactgcaacttagggttgacgctgggatggggtcagggtctggggacgagaggctcgggtttgaggtctgagttcagggcgggggcggggttcgagtcagagatgggtctcactcctgggtcagggttcacagccgcctaggcttcggggtagagaaattggaagccgtatcggggggaggttctggcccggggcgggagtgggagatccggccacgtcggggccgcactcaccatggaaggtcagctcgtcggccgatgccatggtcgttcaggggcgtctccgcatccctcgctgaggacagagaccggtcaggcacacttcccccccgcccccgagccggtccctcggcccccagccctacctggcgaccaactgcacccacggaggcttgaactcgtcgtcccgtccccacaggtgcgctccgccccccctcacctgaggccacctgggccggcgtggctggggctctctgcgcctgcgcgtctcgcctacccgtcagactccaaccgactcagacctgacagcaacatccggcgcctgtcctctttctatcctctcccgttgggaagccacttccggtaaagttggcgcttgcgcagaagagactcccgggctcttaacgtcgggtatcaggagtttcttcccggagcaaggacccccaagacggaagaggatggccgcggcggctctgaggagattttggtcccggcgccgcgcagaggcgggcgacgcggtagtggcgaagccgggagtgtgggcgcggctgggtgagtagcggcggaaggcggcagggtgggtggccgccgcgacagggtgggtggccgccgcggccggatcactcttaccgcgctcctctcccctcagggtcctgggcccgcgcgctgctccgggactacgccgaggcctgcagggacgcttcggcggaggctagggcccggccggggcgcgccgctgtgtatgtgggtctgctgggcggcgcggcggcctgcttcacgctggcgcccagcgagggtgccttcgaggaggcgctgctggaggcgtcggggaccctcctgctgctggcgccggccacccgcaaccgcgagtccgaagccttcgtgcagaggctgctctggctgcggggccgtggccgcctgcgctacgtcaacctggggctctgctcgctggtgtacgaggcgcccttcgacgcccaggccagcctctaccaggcgcgttgccgctacctgcagccccgctggaccgacttccccggccgggtcctggacgtgggcttcgtgggtcgctggtgggtgctgggggcctggatgcgcgactgcgacatcaacgacgacgaattcctgcacctgccggcgcatttgcgggtggtcgggccccagcagctgcattccgagaccaacgagcggctcttcgatgagaagtacaagcctgtcgtgctcaccgacgatcaggtggaccaggcgctgtgggaggagcaggtcttgcagaaggagaagaaggacaggctcgccctgagccaggcccactcgctggtgcaggcggaggccccgagatgaaaccctgaggcccccgagtcctggcaaactgcttgcctggggtggtgcagttctgagtgtgcctcacctgcagaacagctgagacagatgatgtgcaaagtgttttctcactggatttgcacaagtttggggagcctttctgccccccgtctttgttctttattagctgaagctaattcagagccacctgggtccgggagttggggacagcagaacgacttgacacatgttcatcactggcagagctggtcatgagccttttatataagcctttttcatcgggcctcagaggccctccttaaggaggtaccacattggtcagctgacttgcaaactcttctaaggccacttagattttctttttcaagtttgggttgtggcctggcatggtgatgtctgtaatcccagcagtttgcaaactgaggcaagagaatcgcttgaggccaggagtttgaggccagctagagtgacatagcaagactccgatgctacaaaaaagaataataatagtaattaactaaataaaatttgagctgaaatgtttttattctatgacctattctctctcgttttttttttttttttttttgagacagggtcttgctctgttttgcctgctggagtgcagtggtgcaatctcggctcactgcaacctctgcctcccaggttcaagtgattctcctgcctcagcctcctcagtagctgggattacaggcctgtgccaacatgcctggcaaattgttgtatttttaatagagatggggtttcaccatattggccaggctggtcttgaactcctgacctcaggtgatccacctgcctcgcatttccaaagtgctgggattataggagtgaaccaccacacctggcctttcattttgataagtaacatttttgccattcccagctctttggaaggctgaggtaggaggattgcttgagatcaggagttcaagaccagtttaggtaaaatagtgagagctttctcaaaaactaaaatatttggaagggtaaagcaggcaaatcatttgagcttaggagttcaacaccagcctgggcaatatggcaaaaccccgtctctacaaaaagtacaaaaatttaccaaaggtgttgaatgagaattgaaaatatgtatacatagaaaaattagccagacatgttggaccatgtctgtagtcccagctattcaggaaggctgagatgggaggatcacctgagcctgggagttcaacgctgcagtgagccacgatcgtgccactgcactccatcttggacaacagagtgagactgtctcaaaaagtaaaataagtggatgggcccggtggctcaagcctgtaatcccagcactttgggaggccgaggcaggtggatcacgacgtcaggagatggagaccatcctagctaacacggtgaaaccccatctctactaaaaattcaaaaaaattggccgggcgcggtggctcacgcctgtaatcccagcactttgggaggcccagtcaggtggatcacgaggtcaggagatcgagaccatcctggctaacatggtgaaaccccgtctctactaaaaatacaaaaaattaccggggcgtggtggcgggcacctatagtcccagctactcaggaggctgaggcaggagaatggcatgaacctgggaggcggagcttgcagtgagccgagattgcgccactgcactccagcctgggcgacagaacaagactccgtctcaaaaaaaaaaaaaaaaaaaaaatagctgggcgtggtggcaggcatctgtagtcccagctactcaggaggctgaggcaggagaatagcgtgaacccgggaggtggagcttgcagcaagcagagattgcaccactgcactccagcctgggcaacatagtgagactccagctcaaaaaaataaataaataagtaacatttttgttttgatttttttaagtttttttttgagacagagtttcgctcttgttgcccaggctggagtgcagtggcactcgccccaaccaccgcctcctgggttcaagcgtttctcctgtctcagcctcccaagtagctgggattacaggcgcatgccaccacgcccggctaatttttgtattttttagtagagatgagatttcatcatgttggtcaggctggcctcaaactcctgacctcaggtgatccgcctgcctcagcctcccaaagtgctgggattgcagacgtgagccaccgtgcccggccctcgttccctattaaaaatacaaaaccaggcaattgacagtgtcatgactattgggatgttacagggaagttttttgtaaaacaacctgtttaccagatgagcattgtaagttactggaggtggcttggaaggataaagcattttctggtctggaaatctatatggaatcatagattctggttatgttgtacttcagtaaccctgaaacagaattctatgaaaagaagtaagttagtgtacacagctggtacttagctaggttatggtaaattgtatttttgttgttgttgttgttgttgagacagagtctcactctgacacccaggctggagtgcagtggcacgatttcggctcactgcaacctctgcctcccaggttcaagtgattctcttgcctcagcctcctgggtagctgggattacaggcatatgccatgatgcccagctagtttttgtatttttagtagagatggggtttcaccatgttggccaagctggtctcaaactcctgacctcaagtgatcctcccacctcggcctcccaaagtgctgggattataggtgtgagccactgcgcccggccaatatttttttttttttttttttttttttgagacagagtttcactctattgcctaggctggagtacagtggcatgatctcggctcactgcagcctctgccacctgggttcaagcgattctcctgcctcagcctcccaagtagctgggattacaggcatctggcactgcgtccggctaattgttgtatttttagtagagacgggatttcactatcttggccaggctggtcttgaactctttgtgatccacctgccttggcctcccaaagtgctgggataataggcgtgagccaccacacccggcctcaatactttttattttttttaagtgtaatttatggccggcgcagtggctcacacctgtaactacaacactttgggaggccaaggtgggaggatcgcttgagtccaggagttcgagaccagcctaggcgacatggtgaaatcctgtctctacaaaatacacaaaattacaaaatacacaaaaattaatcgggtatggtacacacctgtactaccaactattcaggaggctgaggtggaagaattgcttgagcttgggaggttgaggctgcagtgagccaagactgcatcactgcactccagcctaggtgacagagcaagccccgtctcaaaaaattaataaggctggatgcggtggctcacgcatgtgatcccagcactttgggaggctgaggtgggtggatcacaaggtcaagagctcaagaccatcctggccaacatggtgaaaccccgtctaacaaaaattagctgggcgtggtggcgcacgcctgtaatcccagctacttgggagactgaggcaggagaatcacttgaacccgggaggtggaggttgcagtgagccgagatcacgccactgcgttccagtctgggcaacagagtgagactccgtcacacaaaaaaaaaaaaagagaaaaaataaataacataaaactgaagtattaagggagtgatgctacctcaggggcctgtggcaagttaataaaaccaggtggtaaaacaactatctttgtttgtgatacttgtttttgtgtgtttgctactttcaaattttggcatttgacccttgcattcataatcagtgggttgaacaggtgttggtttaagtcagcatctcacttttacagaggaaaagctgaggttcagaaaatttatttttccaaggctgtggcaggaccaagattcgaactgtaactcccagctctgtgacttaatcctcaaacttgtggactttgatcctaataattcttgtcagaaatagttaaatactgctatcagttgccataaataaaaattggatatagaaatacatatataaagccgggcgtggtggctcacgcctgtaatcccagcactttgggaggccgaggcgggcagatcacaaggtcagaagatcgagaccatcctggctaacacagtgaaaccccgtctctactaaaaatatttaaaaaattagccgggcgtggtggcaggtgcctgtagtcccagctactcgggaggctgaggcaggagaatggcgtgaacccgggaggcggagcttgcagtgagcggagatcgagccactgcactccagcttgggcgacagagtgagacttgtctcagaaaaaaaaaaaacaaaaaaaaaaaccagacatatataggctgggtgcagtggctcacgcctataatcccaacactttgggaggccgaggtgggcagatcatctgaggttgggagttcgagaccagcctgaccaacatggagaaaccccatctctactaaaagtacgaaattagccaggcgtggtggcacatgcctgtaattccagccactgaggaggctgaggcaggagaatcgcttgaacccgggaggttgtgatgagctgagatcgtgccattgcactccagcctgggcaacaacagcaaaactccctctcaaaaaaaaaaaaaaagaaaaaagaaaaaaagaaatacatatataaaaaagaaatgcaataaaaccaaaagacacagcctggataacatagcaacacctcgtctctactaaaaataaaaataggccaggtgtggtggctcacatctgtaatcccagcactttgggaggccaagacgagtgggtcacctgaagttaggagttcaagaccagcatgggcaacatggtaaaaccccgtgtctattaaaaatacaaaaaattaaccgggcatggtggcaagcacctgtaatcccagctactcgggagtgagccgagatcatgccattgcactccagcctgggcaacaagagcaaaactccgtcccaataaataaataaataataattaaaaaaaaaatagccaagtgagacggtgtgtgcctgtggtcccagctacttgtgaggctgaggtgagaggatcccttgagcccaggagtttgaggctgcaatgagcttggtcatgccgctgcactccatcctgggccacagagtgagacactatctcccctctaacccccaaaaatgaaaggaaacaaaagacgtcgagatgatactaactaaatgctatctctacaccattacctgccaaaaatctctgtccccaaatctgccctctgttagacattagccaacttcagggaagggttttaaggtgtcatcaaagacacttgtttctcattgatcagaagtattggaaagggtccacaccatcattgcttgagtcagttattaaatgccacttttgacttctcgccagggtgtgttccaggaagatcatctgaagctgctgggagcttgaagctgagggcagtggtcggcgctgttggtaggaattgtggagcttgggcagcctgaaggctttgtgtcttggctttgggcagagggtcagcttttcccagaggtctcactgtacttcagcccatgctctggtgtaaggcagaggacaggaggcataagtgggctttaaagccaggatttggaactcagcttttacacttccttgctttgtgagtgaagtcacttctccatgctttgggctccttatctctaagtgtgggcttgtcagaaaaatttaaaagcccactaaagcacttggtacagagtaggcattcacagtctgtggtgcggctgtgcagggaagattatggctccgaatccatgctgtgaccttcctaagtggttgtggaggggctgatgcaccctgcctagtggtgcagggccaccatgtagggagggcccaatgtctgataggatagagccaaggcacgcttctttctcagatccaagtgacagccgaatctaatatgaacatttctgagttctcccccacaccttgttttcagggacggtctcactctctctcccaggctggagtgcagtgatgcaatctcagctcactgcaacctcgacctccctggactcaagctgtccacccacctcaggctctcaagtagctgggactacaggtgtgcaccaccatgcccagctaacttttgtgtattttttttgtagagacagggtttcgctatgtcacccaggctgttctcgaactcctgaattcaaatgatcttcccacctcggcctcccaaagtgctggattacaagtgtgcatcactgcacccggcctgagttctcccttgaaaaaaaaggcgggggcgggggggagcagtttggagatagggtctcgctgtgtcacccaggctggagtgcattaacgacccattgcagcctcgacctcttggattcaagcaatcctcccacctcagcctcccaagctgctgggaccacagacacacaccaccacaccggctaattttttaagttatttgtagagatgagatctcactgtgttgcccaggctgatctcaaactcctgggctcaagtgattttcctgcctcagcctcccaaggaaataaaatattcttggattcttggttagctttaattatttccgctttccaggctagcccaggagttgccctccagcacgtcctttgaaaagtacttttcggccgagcgtggtggctcacgcctgtaatccaagcactttgggagaccgagatgggaggatcacctgaagtcaggagttggagaccagcctgaccaacatgacgaaaccctgtctctactaaaaatacaaaaattagccgggcatggtggtgggcgcctgtaatcccagctactcaggaggctgaggcaggagaatcacttgaacctggaagacggaggttgccgtgagccaagatggtgccattgcactccagcctgggagacagagcaagactccgtcttaaaaaaaaaaaaaaaagtatctttcccactgttgtgattagaaagaccagcagagggcatcagagacttagttcggagacagaacgtagctgattccatcctgccttacttagcccccatggaatggctcaacgcaggttccttttgtccgcgggcagcagcaagtggaggtcgtgcagcttccacttgcaccagtttactgtgccttggaattggatagatgatggcagaagtcgaggccccacggaggggccaccttcatctctggaacctgcacctttacctacttatgtccacaaaaagagtcagactctgaatctttttttgtttttttttttgttttgttttgttttgagacggagttttgctcttgttgcccaggctggagtgcaatggcacgatcttggctcaccgcaacctctgcctcccgggttcaagcgattctcctgcctcagcctcccaagtagctgggattacaggcatgagccaccatgcccggctaattttttgtatttttagtagagacggggtttctccatgttggtgaggctgctatcaaactcccaacctcagctgatccacccacttcggcctcccaaagtactgggattacaggcgtgagccaccgcgcctggcccagactccgaaaatatctgaagagatttattctgagccaaatatgagtaaccaatggcctgggacacagccctcaggagatcctgagaacatgtacccaaggtggttggggcatagtttgcttttatacattttagtgagacatgagacatcggtcaatatgtgtaagatgggctgggggtgccctggctcacacctgtaatctcagcactttgtgaggccgagaggggcagattgcttgagcctagaagttcaagaccagtctgggcaacacagtgagactctgtctctacaaaaaaatacaaaaactagccagatgtggtggtgcgtgcctgtagtcccagctacttgggaggctgaggtgggaggatcacctaagttagagaagttgaggctgcagttgaccacgctgatctcgaactcctggcctcaagcaatgatcctgcctcagcttctcaaagtggtgggattatagacgtgaaccaccacacccagccaacagaagttctttgttttttttttttggtcccaaactttaccgttgacaaccgaagtattttaaagcaaatcccagatatcctgtcatattacccctataatttcattttctttcttcctttttttttttttttttttgagacagattctcgctctgttgcccaggctggagtgcagtggcatgatctcgactcactgcaacctcccaggttcaagcaattctcctgtctcagtctcctgagtagctgggactacaggtgcacgccaccacgcccagctagtttttgtatttttagtagagacagaggtttcaccatattggtcaggctggtctcgaattcctgacctcaggttatctgccccctttggccccccaaagtgtttggattacaggtgtgagccaccacgtctggcctataatttcattttcttatatcatgacactaccattatcacacctatcaaagtccacaattattatttggtatcatctgatattacatttccctgaggatctcaaaagtgtccttttacacttggtttgtttgattcatgatccaaacaaagttcacatactgtatttcgttgttgtgatttttcagtctctcttttttaagacggagtctcgctctgtcgttcagactggagtacagtggcacaatctcacctcattgcatcctccgcctcctggcttcaagtgattctccctgcctcagccttttgagtagctgagattacaggcacccaccaccatacccggctaatttttgtattttcagtagagatgaggttttgccacattggccaggctggtcttgaactcctgacctcaggtgatcctccctcctcggccttccaaaatgctgggattacaggcatgagccactgcgcccaaccttaagtccttttttttttctttttgagacagagtcttgctctgtagcccaggctggagtgcagtggtgcgatctcggctcactgcaacctccacctcccaggttcacaccattctcctgcctcagcctcccgaatagctgggactacaggctcccaccaccacacccggctaattttttttttttttgtatttttagtagagatggggtttcaccatgttaggcaggatggtcttgatctcctgacctcgtgatccacccgccttggcgtcccaaagtgctgggattacaggcctgagacaccatgcccggcctcttaagtctcttttaacctagaagagtgccccctatgcatacacttttgatgtgttgcagaaaaccactttttttttttttctgagacagagtctcactctgtcgcccaggctggagtgcagtggcgtgatctcagctcagtataacctccccatgccgagttcaagtgattctcctgcctcagcctcctgagtagctgggattacaggcacctgccaccacgcccggctaatttttgtatttttattagagacagggtttcaccatgttggtcaggctggtctcaaactcctgacctcaagtgatccacccgcctcaccttcccaaagtgctgggattacaggcatgagccactgtgcccggcccaattttatcacttctgatgggtgcccaggtcaatcgtttcattaatagctgtacaaagaagccagttcttttgttcttgcaatcttatttatagctggtgagccacaggcatttcacatttcctgttactgattcaccaggtgaacaaataaaaacctgaaagagccagtccttcaagatggatctggagtggcagactgggcttcaattttaagtacacccaagcaaccatttgctgaatagaggtcacacatgtattctgagttgccccaaaactcacgcctccgttttaacttttggacattcagaggtctcctggaccaatcagtcagaactcagatgtgtcaaccagtaaaaactaggcaagtttgactccctgatttgcataaacagacttgagtgggaacctgggctggaatttttgctataatacctgaaccctcgggaggctaaggcaggagaattgcttcaacccaggaggcagaggttgcagtgagctcagattgcgccactgcactccagccagggtgacagagccagactgtctcacaaaaaaaaaaaaaaaaaaaaaaaaaaaaaaaaaaaaaaaaaaaaacctgaaccctccctttgttctctggaatgcaccttcattttacaccaaatactgtgtctcttcagtttgcaaactgttgactggaatacaatctattccctccaaattccttttcagagaacattggttcacaatcatgtcctaccagaaggagtttctggggaattcacagccatctacagaagacatccttgacttgccttttgaggtttccctcagggcagccacaaggatgctgtgttcctttcccatgttgtggcaggccacagtgacaatttctttttctttttcttttttttttttttgagatggagcctcgctctgttgccaggatggagtgtagtggcgcagtcttggcttactgcaaactccacctcccaagttcaagcgattctcctgcctcagcctcccaagtagctggaactagaggtgcatgccaccatgcccagctaatttttgtacttttagtagagacggagtttcagcatgttggccaggatggtctcgatctcttgacctcgtgatctgcctgcctcggcctcccaaagtgctgggattataggtgtgagccaccatgcctggcccacagtgatgattatgaatagctattcattatttgaaaatgaatagtatctgaagtatctgagacaggtctccatcaaattagaaattcattttgccaaggtttaggacatgcctggaagaaataaacacagggccaggtgcagtagtttacacctgtaatcccagcgttttgggaggccaaggcgagcagataacccgaggtcaggagtttgagaccagcctggccaacatggtgaaaccccatctctactaaaaatacaaaaattagccgggcgcggtcgtgggcacctgtaatcccagctactaaggaggctgaggcaggagaatcgctgtgcaccactgcactccagcctgggcaacagagggacagaaagagacagagagacagagagagacagagggaggcagggagggagagagggaggagtggggcagggagggagggaaaggaaaggaaaggaaggaaagaaaagaaaaagagaaaaagaacgaaacatagaatcacggacacagttcataatctgtgtctttctccaaaaattattttgagggcttcagtatttaaaggggaaaagtgggctggagggcaaatgggagagtaatgtgtccatgtgtaataaaatccatatatgtaatgtatcccaaatgtatccatatgtaattcacatattcctacagaaaaggagcaggtagggggatagtcaattatgtattcgtctggcgcccagtaaatggtcactttccataagataaagtgaacacagggtaggtacctatggagcttttttttttttttttgagatggagtctcgctctggcgcccaagctggagggcagtggcaggatctcggctcactgcaagctccgcctcccgggttcaggccattctcctgcttcagcctccccagtagctgagactacaggcgcctgcaaacacgcccagctaattttttttttttgtattttttttttgtatttttagtagagacggggtttcactgcgttagccaggacggtctccatctcctgacctcgtgatctgcccgtctcggcctcccaaagtgctgagattacaggcgtgagccaccgcacccggcagattttttttttttttttctttgagatggagtctagctctgtcaccaggctgaagtgcagtggcgcaatctcggctcactgcaacctccgcctcctgggttcaagcgattctcctgcctcagccttctgagtagctgggactacaggcatgtgccaccaggcccagctaatttttttttttttttcatggagatggggtctcaggcttttgtctcgaacccctgggccaagtgatcctccaacctcagcctcctgagcagctagttcttttctagtgtaatatattatcttacggaatatattccattgtctgcatggaccccagttggtttattcacccatctacttagtgacatcttggttatttcaaagctgacatggtaggtattactggtcgccttacaggggaacagcaggacatctgtagtgtgtggtgaacactagagggagcaagaaccccctttctctatcaggtgggtgttacccatttcccagctgcactaatctgtcgttccttgtagaggcctgatctggtgtttgccctgaatgagagatgatctggaaaccatttgtgggaaaattaagttagacatccttccattgaaataaaatgcaggggccgggcacagtggctcacgcctgtaatcccagcactttgggaggccaagtcgggctgatcacctgaggtcaggagttcgagaccagccaggccaacatgactaatttttttgtattttcagtagagacggggtttcaccgtgttagccaggatggtcttaatctcctgaccttgtgatccgcccgcctcggcctctcaaagtgctgggattacaggcgtgagccaccgtgcccagccttgcagcaaataattacatgaaaaaataattaatttaaattctggcaagttctttgaatcaaaaccagggagaggtgctctgctctaataacccagctcttgtggatgttattcatgctaaaacttgtaggattttccattgcttgagttctgctgtagtgttattgcttatcagtgtaggatctgtgctctgtggattggtttaaactttactcgtgggacagctggctttgaaaagttttcatcatcccctgcagggactgcactggtctttgttgaggcacatctaatgttgatagctctgtttcctcccagctggggctccaatctgtgaccttgcttaggtagtgatgctctgaaaagtctccctatttcttctgagaacagttagatattgggtgtaggcttttgaaataatatgataggcctcactctgtaggggtttttacaaaagccactataggctggacgtggtggctcacactgtaatcccagcacattgggaggctgagatgggaggattgcttgagacgaggagtttgagaccaggagtttaagaccagcctggtcaacatagtgacacctccatctctttaaaattgttgtttaattatataaaagccactgtagagtttgaatgctttcaaaatatcaagaggatgaccacaatgaagtaaactgtcacggtggggcacagtgcctcatgcctgtaatcccagcactttgggaggctaatgtggatggatcccttgagctatgagtttgagactgacctgggcaacatagggagaccccatctctactaaaaatatgaaaaatttagtaaaaaccctgtctctactaaaaatacaaaaattagccagatgtgctggcatgtgcctgtagtcccagatactggggaggctgaggtgagagaatcacttgaacctgggaggcagaggttgcaatgagctgagatcatgccactgaactccagcctgggcaacagagcaagactccctctcaataaataaataaataaataaacaaataaataaataaatactaaaataaaatatagccagggcacagtggctcgcacctgtaatcccagcactttgggaggccgaggtgggcagatcatgaggtcaggcgttcgagaccagcctggccaacatggtgaaaccccatctctactaaagatacaaaaagttaggcatggtggtgggtgtctgtaatcccagttactccggaggctgaggcaggagaatcgcttgaacctgggaggcagaggttgccgtgaactgagatcgcgccactgcactccagcctgggtgacagaccaagactccctctaaaaaaaaaaaaattacctgagtgaggtagtgtgctcctgtagtcccagctacttgggaggctgaggtggaggatcacctgagccccgcaggttgactccatagtgagccatgatcatctcactgcactccagcctagttgaacagtgagactctgtctcaaaaaaaaaataaaaataaaaaaaaagagggagaggctgggtgtggtggttcatgcctgtaatcccagcactttgggaggccgaggcaggtggatcacgaggtctggagatcaagaccatcctggctaacacggtgaaaccctgtctctactaaaaatacaaaaaattagctgggcgtggtggcacgtgcctgtagtcccagctactcgggaggctgaggcaggagaatcacttgaacctgggaggtggaggttgcagtgagctgagatcgcgcccttgcactccagcctgggtgacagagcgaggccccatctcgaaaaaaaaaagagggagagataacatgtcacacccatgagaatagctagtaaaacaaaacaaggctgggtgctgtggctcatgcctgtaatcccagcactttcagaggccaaggcaagaggaccacttgaggccaggattttgacaccttcctgggccagagagcgagatcctatctctaaacaaaaaaaaatatttttttttttgaaatggggtctcactctgtcgcccatgctggagtgcagtggtgcgatctcagctcactgtaacctctgcctcctggattcaagcgattcttgtgcctcagcctcgcaagtagctgggattacagatgtgtgccaccatacctggctagtgttttgggttttttttttttttttgcttttttttgagacacagtctcattctgtcgcccaggctggagagcagtggcgtgatctcagctcactgcaacctctgccccctggattcaagcgattcttgtgtctcagtctccaaagtagctgggattacagacgtgtgccaacatggccggctagtgttttgtttgttttgttttgtttcgttttgagacagagtctcattctgtcacccaggctggagtgcaatggcatggtatcagctcactgcaacctccacctcctgggttcaagcaattctcctgcctcagcctcctgaatagctgggattacaggcacacaccaccacacctggctaatttttgtatttttagacagacggggtttcaccatgtagaccaggctggtctcgaactcctgacctcaggtgatccgcctgccttgtcctcccaaagtgctgggattatgggcataagccactgtgccagaccaaaaaaaattttttttaattagctaggtgtggtggcgcatgcctgtggtcccagctattcaggaggctgaggcgggagaaccatttgagcccaagaagttgaggctgtggtgagctttttttttcatttttggagaccttccaaaaaagaaaaaaaaaaagctcctttaatgcagatgtttgctatcagctaatggccatttgcctctgtctttttcaatttgcgccctgctgctttccacaaaggttgcaccattttacattcttaccaatcatgctgcacagcactccgagttctctatgtcttcacccatacttgttattttctgttgtgttttgtttgggtgtgaagtggtatctcattgtggtcttgatttgcatttccctaatgataagcgatgttaagaaaatatttcttatttaaaaatgctttctttttttttgtttgagacagtctcgctctgtcgcccaggctggagtgcagtggcgtgatctcggttcactgcaacctcagtctcctgggttcaagtgattctcctgcctcagtctcccgagtagctgggattacaggtgcccgccaccacgcccggctaatttttgcatttttagtacagacagggtttcactgcattggccaggctggtctcaaactcctgacctcaggcgatccactggcctcagcctcccaaaatgctgggaatacaggtgtgagccaccatgctcgcccaaaaatattttaaggtgaaggctgggtgcagtggctcaagcctctaatcccagcactttgggaggccaaggggtggggggggggggtgggtcacctgaggtcaggagttcgacaccagcctggccaacatggtgaaactccgtctctactaaaaatacaaaattagctgggcatggtgcacacttctctagtcccagctacccaggaggctgaggcaggagaatcgctggaacctaggaggcagaggtgccagtgagccaagattgcgccactgcactccagcctgggtgacagagtgagtctccgtctcaaagaaaaagaaaaaagaaaaatggaccaggcgccgtggctcatacatgtaattccagcattttgggaggccgaggtgggcagatgacttgaggtcaggagttcgagaccagcctggccaacatggtgaaaccccatctctactaaaaatagaaaaaatttgccgggcatggtggcaggcacctgtaatcgcaggtactcgggaggctgaggcaggagaatcacttgaacccaggagacggaggttgcagtgagtcaagattgtgccactacagtccaacctaggtgacagagcaaatctctgtctcaaaaaaaaaaaaaaaaacaactccgggcacggtggctcacacctgtaatcccagcactttgggaggccaaggcgggctgatcacgaggtcaggagatcgagaccatcctggctaacacggtgaaaccccatctctactaaaaatacaaaaaattagccgggcatggtggcgggtgcctgtagtcccagctactcgggaggctgaggcaggagaatggtgtgaacccgggaggcagagcttgcagtgagccaagatccgccattgcactccagcctgggtgacagagcgagactccgtctcaaacacacacacacagacacacacacacacacacaaagaaaaatcaattaaattaaatgttttgttttgtccactggttctcaagcaggggaaattttgacctccctggaaatatttcacaatatctggagacatttctagttgtcagaactggaggaggggtgttactgggactaatgagctgctaaacattctaccatgtacaggaaatccccctcaaccaagaagtaactaagccaaaatgcctataatgccaacattaaaattcctggaatagctcttttagttcgcagcaggagggtagactacacaacctggtttgctatcagatcaaacaaacaaaaatcttcataatcagaaattaaaatatttggccagacacggtggctcaggcctgtaatctcagcactttgagagtctgaggcaggaggatcacttaagctgaggaatttgagaccagcctggacagcataatgagacccctctctacaagaaaattaagaaaaaaggctgggcacagtgcctcacgcctctaatcccagcactttggcaggctgaggcaggcggatcacctgaggtcaggagtttgacatcaacctggccaacatggcaaaaccctgtctctactgaaaatacaaaaattagccgggtatggtggggggcaccaaataatcccacctacttggaggccgaggcaggagaaccacttgaacctgagacacagtggttgcagtgagccactgcactccagcctgggtaacagaatgagactccatcccaaaaaagaaaaaaagaaaattaagaaaaaaaaaatgtcattaacattccagtactggccgggcctggtggctcatgcctgtaatcccatcactttggaaggccgaggtatagatataaggatcacctgaggtcaggagttcgagaccagcctggtcaacatggtgacaccttgtctctactaaaaatacaaaaattagccaggcgtggtggtgggcacctgtaatcccagttactctgggggctgaggcaggagaatcgctggagcctgggaggcacaggttgcggtgagacgagatcacaccattgtactccagtgtgggtgaaagagtgagaccctacatcaaaaaaaaaaaaaaaaaaaaaaaaaaaaaaaggccaggcgcagtggctcatgcctgcaatcccagcactttcagaggccgaggcgggcagatcacaaggtcaggagattgagaccatcctggctaacacggtgaaaccctgtcttttctaaaaatacaaaaaattagccaggcgtggtggcaggcgcctgtagtcccagctactcaggaggctgaggcaggagaatggcgtgaacccaggaggtggagcttgcagtaaaccaagattgcaccactgtactccagcctgggtgacagagcgagactccatctcaaaaaaaaaaaaaaaaaaggaaaaccagatttggcaccccaaaagaacagcttttcttccaagtgaggcctcttggcagtaattcccacgcctgctggctgactcactgccacctggtgccttcctaattccattctgtcacgtggaacacgaaactaatctcagaaggtcccacgatgtgagtccatgacaagcacctccgcgtcccctcgctttggaaatagcccagaaatacagaagccatatatatttttcttttttctatttgagacacaatctcactctgtcgcccaggctggagtgccatggtgcgatctcggctcactgcaacctctgcctcctgggttcaagtgattcttatgtttcagcctcccgagtagctgggactacaggcacgctgccaccatgccagctaatttctgtatttttagcagagacgggatttcaccatgttggccaggctggtctcgaactcctaacctcgggtgatctgcccacctcagcctcccaaagttctaggattacaggcttgagcccccacacctggcccagaatccatgttcttaatcagatgaaatcagtctcttaaatttcccagggcgacccgatcagcagtcaattctcagttaactggggctgattcttttcgtttgaagatttctcacatctctcagctggcacctgaaactgatcacaaggacctaggcagagttcagtggtggatagctgggtggcctggagtattgctgtttatgactttttaaaaaattctgcaggctgggtgcagtggctcacacctgtaatcccagcactttgggagggcaaggcaggtggatcacctgaggtcaggagtctgagaccagcctgaccaacatggtgaaaccccatctctactaataatacaaaaattatctcggtgtggtggcacgtgtctgtaatcccagctactcaggaggctgaggcaggagaatcgcttgaacctgggaggtggagggtgcagtgagccaagatctcgacactgcactccagcctgggcgacagagtgagactctgtctcaaaaaacaagaaacaaacaaacaaaaaaattgtggtaaagctgggcatggtggctcacgcctataaaatcccagcactttgggaggccaaggcaggcggatcacctgaggtcaggagttcgagaccagcctggccaacatggtgaaaccttgtctcttctaaaaatacaaaaaaaaaaaaaaaaaagctctgtcattgtggcatgcacctgtaatcccagctactcgggaggctgaggcaggagagtagcttgaacccgggaggtggaggttgcagtgagctgagattgcgccactgcactccagcctgggcgacagggcaagactccgtctcacaaaaacaaaaaaaaaaaaaaaaagaagaaggccgggcgcagtggttcaggcctgtaatcccagcactttgggaggcagaggcgggcagatcacgaggtcaggagatcgagaccatcctcgctaatatggtgaaaccccgtctctactaaaaaaaaaaaatacaaaaagattacccgggtgtgtggtgggcgcctctagtcccaggtactcaggaggctgaggcaggagaatggcgtgaacccgggaggcagagcttgcagtgagccaagatcgcgccactgcactccatcctgggcgacagagtgagactccatctcaggaaaaaaaaaaaaaaaaaggctgggtacggtggctcatgtctgtaatcctagcactttgggaggccaaggcaggaggaccacttgagcccaggtgtttgagaccagcctgggcaacatagcaagatgtatctctaaaaaaaaaagttcaaaaattagctgggtgtgctggcaccaacctgtagtgggaggctgaagtaggaggatcacctgacccctgggaggttgaggcttcagtgagccatgatcacaccatgacattccagcttgggcaacagagtgagaacctgtgccaaaaaaaaaaaaaaaaaaaaagagaaaaaaattgtggtaaaatacacattacataaaatttcccttttctttgagacagggtcacactccattgtccaggctggagtgcagtggcacaaccttggcttgctgcaacctctgccacccatgttcaagtgattctggtgcctcagcttcccgagtagctgggactacaggcatgtaccaccacacctggctaatttttgattttttttttttttggtagtgatggagtatttttggtagagacaggttcttttgggtatttttggtagagatggggttttactatgttggccagcctagcctcaagtgatctgctcacctcggcctaccaaagtgctgggattacaggggtgagccatcgtggccagaccaattttttatttttagttgaaaaaaggtcttcctctgttgcccaggctggtcttgaactcctgggctcaagtgatccccccacccgggcctcccaaagtgctgagattacagatatgagccaccatgcctagccttattttatttttaacagtagctctcctaatggtgtgaggtggctgccacttctgaatttttttttttttttttgagacagagtctcgctctgttgcccaggctggagtgcagtggcacgatctcagctcactgcagtttctgcctcctgggttcaagcaattctcatgcctcagcctcccaagtagctataaccacatctggctaatttttgaatttctagtagagatgggttttcaccattttggccaggctggtctcaaactccttgcctcaagtcatctgcccccgtaggcttcctaaagttgtcacttatgattttttttttgagacggagtctcgctctgtcgccaggctggagtgcagtggcgcgatcttggctcactgcaagctcagcctccgcctctgcctcagcctcccaaatagctggaactacaggcccaagccaccacacccagctaatttttgtatttttagtagagatggagtttcagcatgttggccagaatagtctcgatctcttgaccttgtgatccatctgcctcggcctcccaaagtgctgggattacaagcatgagccaccgtgcccagccttttctttttttttttttgagacggagtctctttctgtcgcccaggctggagtgcagtggcacaatcttggctcactgcaagctccgcctcccgggttcaggccattctcctgcttcagcctccccagtagctgagactacaggcgcccgccaccatgcctggctaattttttgtatttttagtagagacggggtttcactgtgttagccaggatggtctcgatctcctgacctcgtgatccgcccgcctctgcctcccaaagttctggcattacaggcgtgaaccactgcgcccggctagcctttttcttttttaattgagatggagtttagctcttgttgcctaggctggagtgcaatggcgcaatctaggctcactgcaacctctgcctcctgggttcaagcaattctcctgcctcagcctcctgagtagctgggattacaggcatctgccaccatgcccagctaatttatttatttttagtaaagacggggtttcttcatgttggtcaggctggtctcaagctcccgacctcacgtgagccacccgccttggcttcccaaagtgctgggattacacacttgagccaccgcgcgcctggccgatttttttttttttttttttgagatggagtcccattttgtcgcccaggctggagtgcaatggcacgacctcggctcactgcaacctctacttcccaggttcaagcgatcctctttcctcagcctccagaatagctagactacaggtgtgtgccaccacatctggctaatttttgtattttttttttagtagaggcggggtttcaccatattggccaggctggtctcacactcctgatcttgtgatctgtgtgccttggcctcccaaagtgctgggactagaggcgtgagccactgcacccggcctacacttacgatttttaagaggctgttgctgtcttctgttttcagagaagtgcatttcaagtttacaaaattgcctagcatggtggctcatacctttaatcccagcactttgggaggctgaggtgagaggattgcttgagctcaggagatcaagaccagcctgggcaacatggtgaaacttcatctctacaaaaaataaaaaaaattaaccaggtgtggaggtgcgcaccagtagccccagctactcaggaggctgaggcgagaggatggcttgagctctggaggttgatgctacagtgaaccatgattgtgctactgcactccagcctgggtgtgaccaagtgagaccttgcctcaaaaagtaactaactacctacctaattaaatgtttacaaagtcactagaagaatttgtgtgcagccccagggaaaagtaatagctggataagcccagaacagcaaaatgctttttctgagagaagcagacctgctgaggcccagactcactcttctcagactgagagcacatctgcaggtgatgtttgggaaaccccggcttggcttgccttgggacacttccagtagctccagttcagggttggaaaacctgttctgccactgtcttgtggatgccactcccaggtttatatatttatttattttttgatggactttcactcagtcacccaggcaggagcggagtggcataatctcagtcactgcaacctccgcctcccaggctggagagattctcctgtctcagcctcccgagtaaaactgggaccacaggtgcccgccgccaagacttgctaatttctgtgtttttagtagagacagggttttcccatgttggccaggctggtttcaaactcctggcctcaagtgatctgcccgcctcagcctcccaaagtgctaggattacaggaatgagccaccacgcccagcgcaatcttaggtggattttctccattttacttgtactcgtgtgtgtgtgtgtgtgtgtgtgtgcgcgcgcgcgcgcgtgtgtagtaaattgtatacaatttgcttcctatgtaggtttgcatattcacgcccacattcaaaatactgatcatggctgaggcgagtgggtcacttgaggtcaggagtttgagatccaccaggccaacatggtaaaactcaatccctactagaaatacaaaaattagccgggcgtggtggtgggctcctgcaatctcggctatttgggaggctgaggcaggagaattgcttgaacccaggaggtggaggttgcagtgagccaagattgcaccactatactccagcctgggagacacagcgagactccatctcaaaacaaatcaaatcaaaacaaaacaaaacaaaaaaatttaatcagatagtatgtaacatttttgagattggcttcccctccccggttcccgcccaaagcataattccctagagattcattcatctcgcctgggtgccgtggttcacgcctgtaatcccagcactttgggaggccgaggcgggcagatcacgaggtcaggagattgagaccatcctggctaacacggtgaaaccccgtctctactaaaaatacaaaaaattagccaggcgtggtggcaggtgcctgtagtcccagctactcaggaggctgaggcaggagaatggcgtgaacacaggagacagagcttgcagtgagccgagatcccgctgctgcactccagcctgggcgacagagcaagactccgtctcaaataaaaaaaaaaaaaaagagagattcattcatctcatctgttgtgcatctcaatagtttattcctttttatttatttttttgagactgggtcttgctctgtggccctggctggagtgcagtgatgaaatcatgactcacacagccttgatctcctggcctcaagtgattctctctcctcagccttccgagtagctgggactataggcatgtgctgccacgcctcgcttatttttaaaagttttctagagatactgtctccctatgttggccaggctggtctaaaactcttgggctcaggcgatcctcctaccttggcctccaaaaatgctgggaatacaggcatgagccaccgcacccagtttggtgattactcttggtggagacccaaagtgccatcattcagagccagaatcttagaagagcttaataaattcaacttaagataaaacaatatagctaaaataaaacacctacaaaatttctaacaaatgtgggcagtcaggtttccatatgtagttggtagaagtgggatgcttagtataaacatgatgtgaaatgctggggatttcctgaattgtgttaaaaccacagctactggataaaataaagctattgccctgagtttctgtcttggaagaactgttttctgcatcgtacatctcactgctaggtttacggaaatcacctttttttttttttttgagacagagtctccctctgtcacaaggctggagtgcagtggggcgatcttggctcactgcaacctcacttctgcctcctgggttcaagcgattctcctgcctcagcctcccgagtagctgggattacagatgcccgccaccacgcccagctaatttttctacttttagtagagacagggtttcaccatggtggccaggatggtctcgatctcttgacctcgtgatctgcccgcctcggcctcccaaagtgctgggattacaggcctgagccctgccaattccttttttttttggagatacagtcttgctctgtcgccctagctggagcgcaatggtgcgatctcagctcactgcaacctctgcctctggggtttaagcgattctcctgcttcagcgttctgagaagctgggattacaggcatgcgccaccacgccggccaatttttgtattttttgtagagacaggatttcaccatgttggtcaagctggccttgaactcctgaccgtgtgatctgcccgccttggcctcccaaagtgctgagattacaagtgtgagccaccgcgcctgacctctttcttttttttctctttgagacagggtctcctctatcaccaggctagagagccttctgggctcaggtgattctcctgcctcagcctccggagtagctctgattacaggtgctcaccaccatgccatgctaatttttgtatttttagtagagatggggtctcgccatgttgcccaggctggtcttgaactcctgggctcaagcaatctgcccgtctcagactcccaaaataccaggattacaggtgtgagccactgtgcccaggcacaagaggtcatttttgatgaataaatgcacattttgttaactaatgagtgatttcatattccaaggaagatctggagatattactgaaaaggtgtttaacttgcagtggcaactgaagtcaatgtattttacattttcatgttctggacttgggtgagttgttatttcaagccctcatctttgagtaaaagagaagaatccacctgtaatcccagccactcaggaggctgaggtaggagaatctcttgaacctgggaggtgggaggtggaggttgcagtgagccaagattgagccactgcactccagcctgggtgacagggcaagactccgtctcaaaaaacaaaaaaaaaaaaaaaaaagaagaaggccgggcgcagtggctcatgtctgtaatcccagcactttgggaggccaaggtgggcagataacgaggtcaggagatcgagaccatcctggctaacacggtgaaaccccgtctctactaaaaatacaaaaaattagcctggcgtggtggcgggcacctgtagtcccagctactcaggaggctgaggcaggagaatggcgtgaacctgggaggcggagcttgcagttagcggaaattgcgccaaaaaaaaaaaaaaaaaaatccattctcctctgggatgattcccctcccccacttcccgttccctcctctcccctcccctcccctgccctgccctctcctccccttcttttttttttttttttgagatggagtctctgtcgcccaggctagagtgcagtggtgtgatcttggctcactgcaaccttcgcctcctgggttcaagcgattctcctacctcagcctcccgagtagctgggactacaggtgcttgacaccacacctggctaatttttgtattttaatagagacggggtctctcttttttttttttttttagagacagactctcgctctgtcgcccaggctggagtgcagtggcgggatctcagctcactgcaagctgtgcctcccgggttcacgccattctcctgcctcagcctcctgagtagctgggactacaggcgcctgccactacgcctggctaatttttttgtatttttagtagagacggggtttcactgtgttagccaggatggtctcgatctcctgacctcgtgatctgcccgcctcggcctcccaaagtgctgggattacaggtgtgagccactgcgcccagctgagacggggtttcaccatattgaccaggtctcgaactccatattgaccttgcgatcccagagaaagtgctgggattacaggcgtgagccaccgtgcctggttgagacagggtttcaccatattgacctggtctcgagctcctgaccttgtgatttgcctgcctcggcctcctaaagtgctggaattacaggcgtgagccactgcgcccagcctgtagatgttttttttttaaagtctggaagccaagggtgtcaatgcagacatggggccaaggtcccaggggcagttcattattaagaactgtgctcttaattgagacacctggcaaattttgtattgctttgtagagatggggtttcacaatgttacccaagctggtcttgaacgcctgtcctcaagtgatctgccagcctgggcctcccaaagtactgccattataggcatgcatgagctaccacaaccggcctgtttttcttttttgagacggagtttcgctcttgttgcccaggctggagtgcaacggcatgatctcagctcaccgcaacctctgcccgctgggttcaagcgattctcttgcctcagcctcccaagtagctgggattacaggcatgcaccaccacacccggctaattttgtatttttttagtagagacagggtttctccacgtcggtcaggctagtcctgaactcctgacctcaggtgatccgcctgcctcggcctcccaagtgctgggattacaggcgtgaggcaccgcgcctggcccggcctgtttttctttacactattgcatattagtgtgattagcataaaagacaattagagaacagtcataccatccactccatgggcagcaaccctgcctcctccatgcattgctgcagggtattcctagctcaatgcttagcatttggagagagcataagaaatactatttggccgggcgccttggctcacgcctgtaatcccagcactttgggaggctgaggtgggaggatcacctgagcccaggagtttgaaaccagcctggacgacatagtgtgactgtctctacaaaaaattttaagaaaattagctgagtgtggtgtcccacccttgtagtccaagctactcgggaggctgaggcaggaggatcgcttgagcccaggaggtcgaggctacagtgagtactgatcgtgccaccgcagtccaggctggatgacccagcaagcctgtgtctcaaaaacaaaaacaaaaaaacaaaaaaataactacttgaatgaatgaggaatcgagttcagatcccacttctacttgctcacttactgtgcactattcaataacactagctgaggatcagagagctagcaggtgggctacctgctgtcatgattcctcataaccaaacagtggaagtgggagccattattgtttctggtgggttttttttgttttgtcttgttttgtttttgagacggaatctccctctgtcaccaggctggagtatagtggcacgctcgactcactgcaacctccgcctcctgggttcatgcaattctgcctcagcctcctgagtagctggcactacaggcacgcgccaccacagccagctaatttttgtatttttagtagagatggtgtttcaccacattggccaggatggtctcaatctcttgacctcatgatccacctgccttggcctcccaaagtgttgggattacagacgtgagccactgggcccagcattttttttttttttttttttttttgagatggagttttactctcgtcacccaggctggagcgcaatgacatgatcttggctcactgtaacctccacctcctgggttcaagaaattctcctgcctcagcctgccgagtagctgtgattacaggcacctgccactatgcctggctaattaatttttttgtatttttagtagaaacggggtttcaccatgttggccaggctggtctcgaactccttacctcaggtcatctgcccaccttggcttccgaaagtgctgggattacagatgtcagccaccgcacccagccttattgtttgtttcacaggtgaagaaagtgaggtgtagatgctctggtaaacctgcctggtattacccatgcatcacccaggtagtagaaatggagtcgtgttttaaacccaggtccttctggggcctggcttggtggctcatgcctgtaatcccagtgcactgggaggctgagccaggaggactgcttgagcccagtagtttgagaccagcttgggtaacacagcagacctcagctctacagaacataacagacaaaaaaaaaaaaaaaaaaaaaaagctggtggtggtggcatgtacctgtagtcacagctatttgggaggctgaggtggatcccttgagtccaggagtttgaggctgcactgagctgtggttacaccattgcactccagcctgggttacagagcaagaccctgtctctaataaaacaaacaattaaacaaaaacccacccaggtgaggtggctcacgcctgtaatcccaacactttgggaggctgaggtgggcggatcacttgaggtcaggagttaaaaaccagcctggccaacatggtgaaactctgtctcaactaaaaatacaaaaattagccgggcgtggtggcggacgcctgtagtcccagttactcgggaggctgaggcaggagaatcgcttgaatctgggaggcagaagttgcagtgagctgagatcgtgccacctcactccagcctgggcaatggagtaagactccgtctcaaaacaaacaaacaaacaaacaaacaaacaaacaaacacacaaaaaagaaaacacacagaagaggccaagaggctcagggccttcactctcggaggaaggtttctctctttcaccaccagcctgtatgcattcaaacgtgttctttgcaacgacgacttccgtggctgccctatttaaaatgtccatgatcctcccagtgttcacctcacactgtactatttattttttttgagacggaatttcactcttgttgcccaggctggagtgcaatagtacgatctcggctcactacaatctccacctcctgggctcaagcgattctcctgcctcagcctcccgagtagctgtgactacaggcgtgtgccaccacgcccggctaattttttgtatttttagtaaagacggggtttcaccgtgttagccaggatagtctcatctcctgacctcatgatccaccagcctaggcctccctaagtgctgggattacaggcatgagctaccgcgcccggctaatttttgtatttttaatagagacgggtttcaccatggtggtcaggctcgtttctaactcccgacctcaggtgatccggccgcctcggcctcccaaagtgctggattacaggcgtgagccaccaagtccggcctctcatactgcactattttgcttattaatcttgcttcttgtcctccttccccactagaccgagggctccacggcggctgggacacagtagcagatcaataaatatttgctaagctaattaatggcacttgggaagttttgcagagaaggcggccacggtcgggccccgccttgcctccccaaataggcctcgccgccccaggtcagggatcaaagcggttcccaggcgcgcccttggcccgcgggaaaccactgcccggtcttggtccaggcggcccgtcctacggtccagggttcctatttccgagcctcagggacctcctttccccacggaccccacggccaccgggatcccattctccagttgccccatcgtcaccgcggccgccgccaccgccgccgcagtggcgtccgctctgcgcatgctccggggcgtcaagacgcgaggcgtgcagaaggcgaagcgtgcgcaggcgcggggccatcgcggcccgagtggggcggtgcatcggacgcgcgtgcttcctccgggccacgcccacccccgtccgcccagggacgggcgcgcacgcgcgccgggagcggaagggcgggctggcgcgcgcacgaggccgggcaggcggcggaagctggagaggccgccgcggtgctgagggggaggggagccggcgagcgcgcgcgcagcgggggcgcgggtggcgcgcgtgtgtgtgaagggggggcggtggccgaggcgggcgggcgcgcgcgcgaggcttcccctcgtttggcggcggcggcggcttctttgtttcgtgaagagaagcgagacgcccattctgcccccggccccgcgcggaggggcgggggaggcgccgggaagtcgacggcgccggcggctcctggtaaggaacgcgggccgcgggggcagcgcggcgcggggccggggagggcggtttgaatggagccggggcgccgaggggggagggggctgccggcgcgccctgtgcggggccggggtacggcggcgcccgagggtcaagaagcccagccggcagccgcgcgcgtggggaaggccacagtgtcgcgaggccgtggcagcggcggcccccgcggagcggcggggtgggtggggggcccgggccgcgtggaggccgcgcgatcctctccgcgcgcgctctcgccggggtcgccggacaaagctcgcccccctcgcccggcacccctacagtcgccctcccaattacagcggctgcaacaataggcaggcgttggggcttttctggctgcgtggtaacgggtccgacccgaatgttgcgtttttggcgaagctgcgatcggggctcagccaaacctccagatatgtccggcgtcggccggacacgggcattagcggtccccttgggctagccgacctcaaattgtcttaaaaacgtgtcattccagattttcaaggaaaggtaaaggactcccccgatgccttgcagttagtgacttcaaaatgtttgcccgaattggggttggggatggggtcggcggcaagtaggggagcacggaggaaatcctttgctgtgtaaaagcattgcttttcttttgcatccttttttctccttcccaattggtttttcagattaaggcttttattttcaacgtggaccttttgggcgagtgttttgtcccgatcttgaagataccagtcttgattttttttttttttttttttggtcagtgactccttggggaaagtagcaagggaataagcggaaaagccgcttcgcaggaatttgaagcaagttttcagtttggattgataggctgcattcaagcttgattcctggtgctgtcagtcacttagcacactgtcactttagggaagtggcttaacctctctgaacctcttagttttcctcctttgtgaaagctcctttgtgaaagggggtaatctcccaaatggaattggtgaaagcctgtaaaatggttcctcgcaagcgggaagcactattgtaattgtctggtccaatctccctcattgttcagcagataacttcttgaggccctactaagtgttggatggtcgggggttggatcctggagcctctgcagtcttggaggggagcgggtggtaaatgtgggaacaaactctcttggcctatcgtttattgctctgaacctgcactgtgagagggacacagcggacaggcaggggatcggtggtagccagagatcacgggggctgcttggaagagggggcctcaaaatcagggagggtgtgtaggattgtattttgtttttgaggcagagtcttgcctgtcgcccaggctggagttcagagtcccaatctccgctcactgtaacctccgcctcctgggttcaagcgattctcctgcctcagcctcctgagtagctgggactacaggcgcccgccaccacgcctggctaatttttgtatttttagtagatatggggttttaccatgttggccaggctggtctcaaactcctgacttaaggtgatccacccacctcggcctcccaaagtgctaggactacatgtgtgagccactgcgccaggattgtattttgactttccctggccacctcggactagccattgttcccctcagctacattcatacatcaacttggtcctttccggtgtagctgtcacccccagcaccgtgagagctggggttgtgtctgcctggctggccccacagtaccctgggcctgacacatagtaggtctttagcgaacttatgtggattgaatgagggggtcctgtggaagatcgcgtgaccatctgtgtaaaaggcttggtgcagggccaggtgcagtggctcatacctgaaatcccagcacttggggaggctgaggcgggaaaattgcttgaacccgggagtttgagactaacctgggcaacatagtgagacctcatctctacaaaaaatacaaaaattagccgagtgtggtggcatgcaccggtggtcccaactactcaggaggctgaggtaggaggactgcttgagccagagaggtggaggctgcagtgagccattcttgtgcccctgcattccagcctgtgcaccagagtaagactgtctcaaaaaaaaaaaaaaaaaaaaagaaaaagaaagcttggtgcaggactgggggtggattgtaagggatacaggttagttgtttgaacagtttttgcactttccaagccattgtttcctgaacctcagttgtcctcatctcccctacaaagtgtggggtggtggttagcgtggggtggtggtaaggagtactcattctggaatcagacctcctgaattcacacccagctctctaaatcgtagcttaacctcaagcgaggcgcttagcagtagggccccccacttgtgaaacaggtaggacgaggatgcccgaaacttcacaggcttcttgtgagggttgaatgaggtcacatgggaagccgctaacacactgctgcacctgatgcgtagtgaacacttgattttttttttttttttgagacggagtctcgctctgtcatccgggctggagtgcaatgcccctgtagtcccaagctccttgagaggctggggcaggaggtacaggctgcagtggaccatgattgagccactgcactccagcctgggtgacgaagcgagaccctgtctaaaaaaaggaataaaaattaattcatgcatagttaggaaagtaataaatggttttgcatgggccacctaaaatcattttgtgtccagccctttaggagacgtaaatgttgatcgtgcaggcttttgagcaggggaggtgatgtcatcagaattgtgatatagggcagtgcagtggtctctaaacttcttgtcagtgaggagcattccaacatatgtgtatttatttacaatttatttgtgtacctttgcttctccttgggaaccctcaaaacaccaggagataaccttagaccattccatgttttggctgtttgtgggaggtgggagcatgggagggactagggttttgggcagatgtctggtggaactttctttctttctttcttttttttttgagacggaatcttactcttgttgcccaggctggagtgcaatggcacgatctcgtctcactgcaacctctgcctcccgggttcaagcgattcttctgactcagcctcctgagtagctgggatcacaggtgtgcaccaccacacctggctaagttttgtatttttagtagagatgggatttcatcatgttggccaagctggtcttgaactcctgacctcaactgatccacccaccttggcccttggcctcccaaagtactgggattacaagtatgagccaccgcgcccggcctctttttttttttttcttatgagacagagtcattctgtcgcccaggctggagtgcagtggtgcgatcttgactcactgcaacctccgcctcctggtctcaagcgattctcatgcctcagcctctggagtggatgggactaaggacgtgcaccaccatgcccagctaatttttgtattttagtagagaccgggtttcaccatgttggccagaactcctggtctcgaactcctggcctcctgtaatctgcccacctcggcctcccaaagtgttgggattataggcgtgagccaccgtgcccagccagtctggtggaactttctatcagtaaggaaactgaggcctagggttattttctttccacaagggttgtcaagtcaaccacctgggtttgactcctggttttgtctttccatccctcggtcatcaaggctgccatggcacagaaggacccattcatggtgcctgtagacagaacacaatgtgaatagtgccccctggagttgtgcaagaaatgacccagccactcttccccatttatgtggcgaacaagcatgcattgagcgcctgccatgtgccaggcactgctggggagctggggattccatggggaacaggcagacaagggtcctgttcttagtagctcacaccccactcttgacttgcaaagggggacagtactagtacccagcttgtaggattgctgcaagagctgaacaaccagtgacaaatgcgaagtgcttagaatggtgcctggcacatagtgctaaacagttgttagtgctcatcatttattaggattcctgcaacagcctggtgggatgacacagataatatactttttcctctagtcataagttctgtatgtttcaaagtggtagcaaaggagtcagctcctccattttgtccttaatggctgcacattgtttaacagcagggatgcattctgaggaatgcgttgtgagatgattttgtggttgcgtgaagatgatagagtgtgcttacacacgtctagatggtggagcctagtccacatgtaggctctgtggtatagcctattgttcccaggctatacacctgtacagcatgtcactgtaccgattattgtaggcagttgtgacccgatagtatttgtgtatctaaatatatctaaacagaaaacgtatgggaaaaatacagtattatgatctttaaaaaatttttctaattagacaattcaaggaggaaggtataatcttatgggactattgtatatttggtccatcattgaccaaaatgttatgtggtgaagaaaaccatgctttgaaatttcaccataaggcattggaaaagggagagtgtgtttagtggcatggtttttttttttttttttttttttttttttgaggtgaagtttcgctcttgttgcccaggctggagcacaatgatgcggtcctggctcactgcaacatccgactgcagagttcaagcaattctcctgcctcagcctcccgagtagctgggattacaggtgcccgccaccatgcctggctaattttttgtatatttagtagaaacggggtttcaccatgttgaccaggctggtcttgaacttctgacctcaggtgacccacctgcctcagcctcccaaagtgctgggattacagacgtgagctaccgcgcccggccaggtttttaaaaatatcaaatgttcagccgagtgtggtggctcatgcctgtaattcccacactttgggaggcccagcagggcaaatcacttgatcccaggaatccaagaccagcctgggcagcatggcgaaaccccgtctctacagaaaagttaaaaaattagccaagcatggtgttgcacacctgtagtcccagctacttgggaggttgacgtgggaggatcaagccgaggaggtggaggctgcagtaagctgtgatcgcaccactgcactccaacctgggtgacacaacaagaccctatcttaaaaaagccgggggttgggctgggcgcggtggctcatgcctgtattcctagcactttgggagccgaggcgggcggatcgcctgagctcaggagttcaagaccagcctgggcaacattgtgaaaccccgtctctacgaaaatacaaaagaaattagctgggcatggtggtgtgcgcctgtagtcctagctacttgtgagactgaggcaggagaattgcttgaacccgggaggccaaggttgcagggagccgagatcgtgccgctgcactccagcctgggcgacagagcaagactacgtctctacaaaagaaaaaaaaaaagccgggggttgggaaggataacagctgctggaatactgggggaaggtatgagagggaacaggtcagaatgaagcctgaggctgaatggagcttcaggtgctgccaccctcataggtgtcaaccctaaggagacatagcggactcattagtatgcccagtgatttcttgattgaagttttctgttaactgcatcctaaggacattaatcattaatttttcagggtgtgggattgatgggcatgtgatttgtggcctcaactcttcttcatatatgggaaagggcctggatggaagtgccaggtgtagctgggtttgttgttacagggcagagagaagggacacattgatttccctccaattccctcagggaagggggctttcttgtttttattttattttattttattttattttttgaaatggagtcttgctctctctctgtcgcccaggctggagtgcagtggcacgatctcagctcactgcaagctcccccttccgggttcacgccattctcctgcctcagcctcctgagtagctgggactacaggcgcccgccaccacgcccggctaattttttgtatttttagtagagacggggtttcaccatgttagccaggatggtcttgatctcctgacctcgttatccgtctgcctcagcctcccaaactgctgggattacaggcgtgagccactgcgcccgactggaagggggctttctttagaaaataggtaaatgttagtagggtggaaaccaaccctggcccctttcaaatgtgtggtttttttttttttttttggagacagttgtactcttttctcccaggctggagtgcagcggtgtgatctcggctcactgcaacctctgccttccaggttcaagcaattctcctacctcagcctcctgagtagctgggattacaggcgtgcgccaccatgcccggctaattttgtatttttttttaatttttatttatttatttatttttttgagacggagtcttgcttagttgcccaggctggagtgcaatggcacgatcttggctcactgcaatctccgcctcccgggttcatgccattctcctgcctcagcctcccgagtagctgagactacaggcgcccaccaccatgccctgcgggggtttcaccatgttagccaggatggtcttgatctcctgacctcatgatccgcccgcctcagcctcccaaagtgctgggattacaggcgtgagccactgcgcccggccagtaattttgtatttttagtagagacggggtttctccgtgttggtcaggctggtctcaaacttctgacctcaggtgatccgcctgccttggccttccaaactgctgagattacaggcatgagccaccactcctggcctcaaatgtttttttaagtcccagactggtttccagagctttgcttttggggactctgttacctccctaaaggggcatagcttcatttatgtatgtggacacttgtcactgtgaaccgttttgctctgtgtgcagccagctgtgagtgtgatagagtagcacgggccccgtttttaatagtgatcgactttaaaatggttctttgaggaggtgttttttttttctttccactttttatttttttagagacggagactcgctgtgttacttaggctggtctttaactcctggactcaagtgatcctccagcctccacttcctgactagctgtgattacaggcgtgatccactgtgctagctcttgggagttttttaagttttctctttgccactggcaagtcacgccccagtggctcaggaagcaggtggctgatgtgacagttgctgctcacctgttccagtgggagacttgagggggagggtctgctgtgtgcgacccatcttgctccgaaagtcccagtaaaggggcatagtggatgtctcattgtgcccagggagctgaaactgcccctgtgatgatcaaatgtgattctggcacagcctggactggctgggcacctgaaggccttgcctgcctcctggaggcatctcctgggtgcctgtgggagtggctctttacttgcccttcctcttgactctgcccttcctcgaccttcaaggttctcatcctattccttttgatcctcggcctgaatcagttactcaggccctggagtcaaagagacttgaggcgggattctgttctgcatggcttaacctctttgaactcagaattccgttttcctctcagaatctccctggcctccaccctctacctcaagaaccaggggctgaaccccggccctgcctgtctttgccaagccttgctctagggcttggtcagcctcgaggaaggggggccttgttatgtttatttaaaaatttatgttttaggttttactttcttagaagtggaggtcttgatgttatctcccaggctggtcttgaaccccttggctcaaaggatctgcctacttcagcctcccaaagtgctgggattatgggcgtgagccaccacgcctggcgcctttttatatttctttcttttttttttctttttttgagacagagtttgtctcttgttgcccaggctggagtgcaatggcggggtctcggctcactgaaacctccgcctcctgggttcaagcgattctcctgcctcagcctcccgagtagctgggattacaggcatgcaccaccacacctggctaattttgtatttttagtagagacggggtttctccgtgttggtcaggctggtctcaaactcctgacctcaggtgatccacctgcctcagcctcccgaagtgctgggattacaggcatgagccactgcacctggccccctttttatgtttctaacagcacgtcccagccgagaccctggtgttcacccttgcctcatctcttgccctcacttgcacatccattccatcagcatgtccagagaaattaaagtcattatcagaccgtgccactcccgtgcctggaacattctagcagctccccactgcactggatgctcctggaacccctttactgtggccctcaaggcctgtgacttctcccctatgccccacctgtggccgcacccacttgccctctgaggtatgatatggaatatatttggtctttgcgccacatgtcataggagtgataggtgtgtcttttaaaattcataatgagccccttttgatcacagctgagtttatgcttatgaggtgatttaggatggggctcctagatagcccaggatggggctggttaccagaaagaccaagtgcttagagggtggcatgtacggaggggccattgaagctgtctgtattgcttccatctggttgaccccgagtcgtatccgttataataaaccattaatgggaagtgaagtgcctgccttagttctgggcgctgctttagcaaatcaatcaaatcgaggagggggttgtgggaattcccaatttataggtggctgggcagaagtactggaccctgggatgtgcaaatggcatttgtagtgggagcagtcttatgggacagctctttttcttttagagacagagtgtcactctcacccaggctggagtgcagtgatacagtcatagctcactgcagtgtccagctcctgggctcatgtcatgctcccgagtagctgggactacaggtgtgcaccactgccaggcttagctaatttttaaattttttgtagagacagggtgctatacttcctaggctggtttcaaactcttggcctcaagcagtcctcccactttggcctcccaaagcactgtgcttaggtgagcccactgcatctggccgataaagtccttaacttgtgggagatagagtctgaattgagttaaattgtaggacacccagctggtgtttggagacttggagaattacttggaaaagacccacgcatctggtcacagaattgttctcggttatgagagtatagtagaagaaaactggttttctctgagttggtgtcaaaagtgctgtgtgagagtgtagagaaacggagtgtgggccaggcacggtggctcacgcctgtaatcccagcattttgggaggctgaggcgggtggatcacctgaggtcgggagtttgagaccatcctgaccaacatggagaaacctagtctactaaaaatacaaaattagctgggcgtggtggcgcgtgcctgtaatcccagctacttgagaggctgaggcaggagaatcacttgaacccaggaggcagaggttgcagtgagctgagatcgcaccattgcactctagcctgggcaacaagagtgaaacttcatctcaaagaaaaaaaaaagaaacagagtgtgttttcccaccttccctgctccagccacactggctgacttgctgtgccttggaatatgccaagcacagtccagggcctttgcacttgctgttcctctgtggtagataaataaccacatggtgcccatgtcactacagatctctgctcagacatcttcatcactgaggtgtcccaggctaccatagaaggagtgcttctcatctgttaaccctgcgaaccctgcttgattagatttatagcacttccaccctctatgtgacattgtgtcttttttttttttttttctctttgagacaaggtcttggtctgtcacccagcggggagtacagtggtgcaatcatagctcatggcagtctggaccctcccaccttggcttcccaagtagctgggactacagccgcatgccagctaatttttgtatttttcgtagagacgaggtttcaccgtgttgcccaggctggcctcaaattcctggcctcaagtgatcgacctgcctcaacctcccaaagtgctggaattacaggcgtgagccaccatgcccaccctgaatactttttttttttttttttggaggggggagatggagttttgttcttgtcgcccaggctggagtgcaatggtgcgatcttggctcactccaacctccgcctcccgggttcaagcgatttcaattttcctgcctcagcctcctgagtagctgggattacaggcgtgcaccaccacgcttggctaattttttttttttttttttgagacggagtctcgctctgtcacccaggcttgagtgcagtggcacagtctcagctcactgcaacctccgcctcctgggttcaagcgattctcctgtcccagcccccacaccgagtagctgggattacgggcgcctgccaccatgccggctaatttttgtatttttagtagagatgagttttaaccatgttggccaggctggtctcaaactcctgacctcaagttatccactcgtcttggcctcccaaagtgttggaattacaggcatgagccaccaagcctggtcctaatttttttattattagtagagatggggtttcaccatgttggtcaggctggtctcgaacccctgacctcaggtgatccacctgcctcggcctcccaaagtgttgggattacaggcatgagccaccacgtccggccctgaatacttttttttttttttaatataacacttccactttctatgtgacattgtgtcatgtttggctatttctgtcactctgctgtccactcctccaggtaggaattgtgttgttctctgccagatgcctggtgtttggaaccagcttggtgcattcagcgctgttcgtatttgggggtagtcatcagtaagtcctctgctgtggcggtggggaaggcctgtcacgagtgacactgggcaggtatggattctgcatctccctgcccactcttggcctttgcatgcctctgttgtggggactcctcttgccgtctccacacagtgtcactcctcacgctcagtgttgcgtatatagctgataacacagcagacccggtggtggcgcaggacatccatccagtgggcctcggccagccgaaaagaaagaataggggccgggcacagtggctcacgcctgtaatcccagcactttgggaggccaaagtggacggatcatcggctcaggagtttgagactagcctggccaacatagtgaaaccccatctctacaaaaaatacgaaaattagctgggcatggcggtgtgcgcctgtagttccagctacttgggaggccggggcaggagaattgcttgaacccgggaggccgaggttgcggtgagctgagattgtgccactgcactccagcctgggtgacagagccagagtccatctacaaaaaaaaaaaaaaagaatggggttattgatgttccacagggagcgtgggtcaggatggatttgtgacacttgatgcggttactctgcgtgttatgtttctgctgggtcacattgtcacatggagacatgatcagaagagcttgaaaaacatccatctaattgatagctaggatagcatttgcaggcttgcagtgtagacaccacacgtccctgtggggttagaggacactcccctaaggcagagaaccgtcctggatgcttttaggtcccttgggtaggtgctcttaagcggttttctttttttttttttgagacggagtctcgctgtcacccaggctagagtgcagtgatgcaatcttggctcactgcaagctccgcctaccaggtttacaccattctcctgccttagcctcccgagtagctgggactacaggcccccgccaccacgcccagctaattttttttttttttttttttgagacagagtcttgctctgtcacccaggctggagtgcagtggcatgatcttggctcactgcaagctccgcctcccgggttcacaccattctcctgcctcagcctcccgagtagctgggactacaggcgcctgccaccacgcccggctaattttttgtatttttagtagagacggggtttcaccgtgttagccaggatggtctcgatctcctgaccctcgtgatccacccgccttggcctcccaaagtgctgggattacaggcgtgagccaccgcgcccggcctggaggttttcttatagaccaccgaggggaacattttgttttgtagttcacgcatagtaaacggggctggctctgcggaagccatcctgcccattgctgttgttccgcccaagcctctgccataacctgactcccacgttggtctgctgctgaaatgtgtccgtgaacaaatttccccaagccccaaaaaacacaatagcagatatcctgggaccaaacttaaatataatgctagtttctcatgcaaggtgaaaacaaccaccataattccaacaaacagatttccaagggatccgattgctggttagcaacctgccctgcctggggctggtcaccgcagtgctttaagacaaaagctaggggtggcgtgaaagaagagaccagacctcttctcttcctcaagcagtctccttccacatttgaacgtcaacagatgtttctattttagatgataattttgatgaagttgaaaataatgagaacatggtagttctcacatcctttgatctttctcttttatttccacaaagacacttcctgggcatttcttgtgggtatttatttcatgggtattctgatttaggctttttttttttttcttggaagtttttctttaaaaatctgaatataaaaagtaatagatggctattgtaaaaaataaataaaaagcgccagacatctgtgatatggaaagggtaagttcctcatcacatgccatcagagagagctactggctgtgctgacagcggtttgtgcatgttttctttggggtaatttctatgcatggattaacatgcatatatatatatatatatatatatttttttttttttttttttttttttttttttttttgagacagagtcttgctctattgcctgggctagagagctgtggtgcgatcttggctcaccgcaacctctggctgctgggttcaagtgattctcctgcctctgcctcccaagtagctgtgattacaggtgcccaccaccacgcctagctaacttttgtgtttttgtagagatggggtttcaccacgtttgccaggctggtctcgatctcaggtgatccgctcgcctcagcttccgacagtgctgggattacagctgtgagacaccatgcccagccatatgcatatatagttattcttttttttttttttttttttttgagacagggtctctgtcgctcaggatggagtgcagtggcgtgatcttggctcactgcaacctccgtttcctggttcaagtgattatcgtgcctcagcctcctgagtagctgggactacaggcatgcaccattacccctggctgacttttgtatttttactagagatgggattctgctatgttggccaggctggtcccgaactcttggcctcaggtgatctgccttccttggcctccaaagtgctgggattataggcattaacaccatatccaaccttacttttttttttttttttttgagtgtttctctgttgccaggctggagtgcagtggcgcgatcttggctcactgcaacctccacctcccgggttcaagcgattctcttgcctcagcttcccgaatagctgggactacaggccagctccaccacgcccagctaatttttgtattttagtagagatagggtttcaccatgttggccagggtggtctcaaactcctgaccttgtgatccgcccaccttggcctcgcaaagtgctggaattgtaggcgtgagccaccacgcccagcctctcaattcttttttgatgtgccaagacttctgcagcgtgggttgtgtgggggttctgattgctgggcaattgaggagcttctcaagaaattgaggcaatatggccacaccacttctagaccctttggcccagggaaagggttaacctcctggacttttaactgagtgttttacatcttagcttttagattcttgtgccagagtagtttcacttccggtcattccttctggctgctggcctggattcccaggctctgttttctccttgtggaggccccggcagcacccgatccaagggccgcacacatctggatttggcttccacacgctgtactaactattcttgcccttttggcccctgaatcccctcatcctttgctttttccacctgagtaggtgtggcctcctggtctgcaatggatttcattgctgcgtgaatttcccctgctagtgacttatcattgagggccccattgcaggactctaagcggcaccgtgtaagacaccttagggacgacctttggccaccccaggactttgctgaaaatgccaaatccttcgtttcctgtatagaagggcagggatgattggcgatggggtaagaaggggtagagagagaggtgttccttgtccttagacacctttcctggccgtgctcgtttggccttcccgtgtagacatctcgccggagcaaggtgcacccagccccacaccccatccagcttctacagggctggcctcaccccagcccttcagggagggtgagctggccaggaggaggttgagggctgagaacaacaccatgcttatggctgtgggagcaaggagggataagagatgtttgtgggtcaggcactgtggcttgggctaggtgcggtggctcatgcctgtagtcctagcactttcggaggttgaggtgggcggatcacttgagcccaggtgtttgagaccagcctgggcaacacggcgagacctcatttctataaagaaatacaaaaattagctgggcatagtggcatgagcctgtagtcccagctactcgggaagttgagatgggaggatcacttgagcccagaagttcaaggctgtgagctgtgatggcgccactgcattccagcctgggagacagagcgagaccctgtctcaaaaaaaaaaaaaaaattgggccgggcgtggtgcctctcatctgtaatcctagcactttgggaggccgaggcaggcggattgcctgagctcaggagtttgagaccagcctgggcaacatggcaaaaaccctgtctctactaaaatacaaaaaaattagccaggttcggcagtgtgcgcctgtagtcccagctactcgggaggctgaggcaggagaatcgcttgaacctaggaggcggaggttgcagtgagccaaggtcgcaccactgcgctaagcctgggtgacagagcgagactctgtctccaaaacaaataaataaacaaataacaagaacaaaattcttggcagccggccaaatctgtgtgcattgcttgccagggtgggcgtgtcatggctgacagcaggtcctggatcgcacctaggggtttgctgctctccagccagctgcttctacctgatgcgcgcccaagaggggaagccagtctgttgttcctgagcattgcggggcaggagtgttacctgcggtttgtgctggggggaggctgcgttacggactcgagtttttttttgttttgtttttgttttttttgagatgaactcttgctctgttgcccaggctggagtgcagtggtgtgatctcggctcactgcagcctctgcctctcgggttcaatcaattctcctgccccagcctcccgagtagctggcattacaggcatgcaccaccatacccagctactttttgttttttaagtagatacggggtttcaccaagtcggccaggctggtgttgaacttctcacctcaagtgacccgcccgcctcggcctcccaaagtgctgggattacaggcatgggccaccatgcccagcccatgactcagttttctcatttctgttcagggaaaggagcctctgcttcacattttgatgggagcatctgaggacctcatctgtgtgatgctcctagtgcgatacctttcacgtgctaagcagctgctcagtaaacctggggagagatggggcaccttggtttcaccagctgagcggctggcacttcctgcctgtgagtgatggttcgatgttccagcctgtggaggaggaggtggagccacagggaggttacccgtgaggcaggtggcaccgtggcttcacagtccatgttcagagtgtgggatgcatggcagtgagttccactgtggccttggccttgtgacctgaactcttccacttccctgtcatctgtcagctggccagcaggaccactgtagtccctgtgtggtggtgagggcccagtgcggggagtctcagttgttaccatcaagtaggctgaggcccctacctcctggctagatcttccttccttgccatttctttgtgactgagacatcctcagcagttgtaaatcacagggaggtgaaggcaagccacagtccccgctggatttgcaaatatcccttcccttcctctgtcagcatgaccttacggtagacgaggatttcttaaataggaccccagaaatgttaaacctcaaagaccaaacttgatgaactggccttcattagaattaagagcttctctctctttttttctgtttgttgagatggaggtttactcttattgcccaggctggagtgcaatgatgtaatctcggcttcactgcaacttccacctaccgggttcaagtgattctcctgcctcagcctcctaagtagctgggattataggcatgcacccaccacgcctggctaatttttgtatttttagtagagacgggttttaccattttggtcaggctggtctcgaactcctgacctctgcttgcctcggcctcccaaagtgctgggattacaggtatgagccatcacgcccggccgatactttctactttttaaaagtggataccggccacatatgtggtggctcgtgcctgtaatcccagcacttctggaggctgatgcaggtggatcaggagttcaagaccagcctggccaacatggcgaaaccccgtctctactaaaaatacaaaaaatatatatatatatatattttagccaggtatagtggtgcgtgcctgtaatcccagctactcgggaagctgaggcacgataatcgcttgaacctaggaggcggaggttgcagtgagccgagatcacgccactgcactccagcttgggtgatggagcaagactctgtctctaaataaataaataaatagatagatagatatctcaatagccagtaagcatacagaaaggtgctccgtgccattagttgtgagggacatgcaaatgaagaccataagaagatgcgattggacattggcaacattgttaaaagttgtaaggactgacagcagcaagtgttggggttgatgaagagcacctggaatgctgtccctgtgtgggaggtgggaccgtgtgtgtagatgatacaactattttggaaaactagcaaagctaagtttatgcctccctttataaccaccagtttcattcttggacacccaagaagaaccaatgcatgtgttcaccaaatgactctcatagcagcttgatttgtgctggccagaacctggtagagtacaatgtctatgaaaatgagaatgctcacataaaaagaacggatgactctcccagacatggtgaccctgtgtgattgtcttttttttttttttttgagacagggtctttctctgttgcccacgatcatggctcactgcagccttgacctcctgggctcaaacagttctccctactcagcctcctgagtataagctaatttaaaaaaaaaaacttgtagagacagggtcttgctatgttgcctaggctggtcttgaattcctggactcaagcgatccttctgccttggcctcccaaagtgctgggattataggtatgacccactgcccccaacattatattatttatatgttacatatattatatgttataagtatatattgtatattatataatatatgtattatagacgtgacccaccacacccgtcattttattggaagttcaataacaggtgaaaggaagccacagtgatagtcaaaatagtggtttccctgggagagtggtattgactgggggggcccaagaatgccttctggaacgtcaggagggatgtctgacgcagtgttcttcaagctgttcacctatgatcctgcgatcagggcatgtacaagtcagtgagagtaagcagaatcacacgctgctcccctcagtactgagctgaggacgtggagtcgctccacggctctccactttgtgctgcaagtcggccagtgcttgttcaagtgcaggcaccagcaacctcatcacaggctttggcactgggcgatactgctggggatggctttgcatcactcccgggctgttgggatcccctttactgtcactctgcacgtgtctgagctttcaatccggaaatgaatttgcggatgctggtggcacccgcgttcctgtttcactgcagcctgactctagaggcagcattttcaggaggagaggccattctaacaagcctctgtgaaaccccgtgcttctaaaaagcagacttgccttattcgggcacaaaatggttttttggggcagcatcttcagtgtactctgtttttccgttgacaaagttagcgctgctttgagttggagccgttcctggaggctgtgacggcatcgcatgatttgatggaagggagaggggagaagttctaatgctcagtgtaaagtacgattaggtggcatacgcctgtagtcccagctactcgggaggctgaggcatgagaatcgcttgaaccccggggacggaggttgcagtgagcagagatcatgtcactgcactccagcctgggcgacagagtgagactctgtctcaaaaaaaaaaaaatgtacaatgaggagagctataatttcagtcacttcccagtgtatgctcgttggcttgtccaccttcagagagggaaaagatggtttgccctcaatgacctggatctttttctctttttcctctgagacagcgtctcgcccttttgcccaggctagagtgcagtggtgcggtcatggttcactgcagcctcaacctcctggactcaggtaaccctcccacctcagcctcccaagtagctggggctacaggcatgtgtcaccaagcatggctaatttttgtattttttgtagagatgaggttttgccatgttgcccaggctgatcttgaatttctgggttcaggccatccccctgccttggcctcccaaagtgctgggattacaggcgtgctggattgtattttgctgtcagtttcagtttatttgacttagaataaagaccttcaagtgaggaagaagctataggtccctgaatatcacaggatctatgaagtatgtggcagtcctgctgtcccttttcctacctcattgcaacactctgtggacctgagaagactgtggggacagaaggcccagaggggagcgccaaggagccagtgcctccccctgccctggccgtgcccacgttgctgggcttcccacctatggaggtagctgcaggcgcatcctccctgcagacatacccatggaccagaggcttcaggctccaaaatcagcatcttagtaacataaacgcaaggttcagactgttgtcacatggcagaggccagggcggcatctcataatcagacagatcctgtttctgtagcagaatgtgcgaatatccacacggagcagaatcaggtcagattttgcctccagatgaatttccttgcagtaacacatttaggtttgtttatgtcaggggccatcttttcaggattggctggagtgccagccactggttcctcccctgctgagtttcctggtcctctctcctgctgttagccatgaaagtggaatgaggtcattttgagcctttcatctcttgtctaagaatatatccctatggctgggtgcagtgtctcacacctgtaattccagcactttgggaagtccaggctggaggatcccttgagccaggatcaacaagtgtttgagaccagcctgggcaacatagagagacccctgtctctacaaaaaaattaagaaaaattagccaggcatggtgatgcactcctatggtcccagctactcgggaggctgaggcaggaggacggcttgagcccccgaggtcaaggctgcagtgggctatgatggctccactgcactccagcttgggtgatagagtaagactctgtatacaaaacaaaaacccctacctttcaaattaaaactttttccgctagatcacctaatacaatgtaatttttggccaggaacggtggctcacacctgtaatcccagcacttcgggaggccaaggcgggtggatcacctgaaggtcagacgttcgagaccagcctggccaatgtggtgaaaccccgtctctactaaaaataaaaaaattggcctggcgtggtggttcacacctgtaatcccagcactttgggaggtcgaggcggttgggatcacgaggtcaggagttcaagaccagcctgaataacatggtgaaagcctgtctctattaaaaatacaaaaattagctgggcatggtggtgtgtgcttgtaatcccaactactcaggaggctgaggcaggagaattgcttgaacctgggaggcggaggttgccgtaagccaagatcacgccattgcactccagcctgggcaacaagagtgaaacttcgtctcaaaaacataaataaaacaaaaatagaactttttttttttttttgagacggagtcttgctctgtcgcccaggctggagtgcggtggcacgatctcggctcactgcaagcgccgcctcctgggttcacaccattctcctggctcagcctccccagtagctgggactacaggtgcctgccaccatgcccggctaagctttttttttgtatttttagtagagacagggtttcaccatgttacccaggatggtctcgatctcctgacctcgtgatctgcccgccttggcctcccaaagtgctgggattacaggcgtgagccaccgcgcctggccaaaaaatggaactttttaaatcaagagaattaaaaatgtttctacacttcttacagaatttatccttagaaccagaaatatgccggagagttcaggggcaaagagattcattccaaaaggcagcagaaacaagacagatttgcgacatgcttaaccagagaggggctatcaaaaaacccagggtgtcagagccaggaaatgcagtgtagcttttagaatttgtgttttaaagactattaaatgataagaattgccatgggtaagattatatgaaagcctagaatgtattgagaaatttcactgagtgtgggtgcgtcttcagccagcgagggccttcagccagcgaggcggagaagcctctttacagacacaagtatctttcctttcccatttgtctctgggtggttggaggacatccccttatgcatattagcatctaaaggaaaaggtgacgtttccaagtgtcagggaccaaaaagtgccattatttgtgtaatactttatcctttttaaacttaagttcatttattttaagggaaacttggtcttactactttcaatggaaaaccagcagtatttgccataaatatctgttttggctgaattgatggaatttcggttagaggcttgtttttttttttttttttctgagacagagtgtcgctctattgcccaggcaggagtgcagtggtgcgatccgggctcaccgcgatctccgtctcccaagttcaagcgattctcctgcctcagcctccggagtagctgggaccacaggcgtgtgccaccatgtccagctgattttcgtatttttagtagagatggggttcgccttgttggccagactggtctcgaactcctgacctcaaatgatctgcccgcattggcctcccaaagttctgggattacaggtgtgagccactgcacccggccagtcagaggctatttgagctatagtcctgttctttctgttaggaagataagcaagtggagagcagtgtgaagggtagaccagcaccccctgagacaccctctgccgtgatcaggaatatggcaggagcccctgaaggcccctgtggggcagtgcttgtctgtgagcgtggcccaccccttcctgggtagactgactgatcttgtgtgcctgagatgtaggacttcctctgagagtgatcatggagaaacggtttgggtggctggtggggaaggtactggcttcctgtgggatgtagattctgatgtgaccgtatgattgtcccttgctatccctgtcctgcctcgcccttggtcatgaaccccagactgaccaggactgtcttccagcaggaggccactgtctgcagctcccgtgaagatgtccactccagacccacccctgggcggaactcctcggccaggtccttccccgggccctggcccttcccctggagccatgctgggccctagcccgggtccctcgccgggctccgcccacagcatgatggggcccagcccagggccgccctcagcaggacaccccatccccacccaggggcctggagggtaccctcaggacaacatgcaccagatgcacaaggtagggatccctgtgcccgcctcgcacctgcggcctctgcccactagggctgcaggcagcctctggaccgagggccttacttggaggatggggggaagccttcttgttggaggtgtcctgccttggctcagccccctaccccagggcccacggccatgaacagaaggttcagctcgtcagaccccagcctgtgctggcgcatgatctgggccccgcgggcacctgccccaccgtttcccgctcccttgctttctgcatgtgaaatttgggaatatcactacaaagttttcttttggtaatgaagaaaaacatccaaattcctaaaaaggcttttagccacgtggtttcccccgttctggctgtcaggctcacctgtgcagctcgcagagccgagcagcgggttccctttcctccaaggcgtgcccctcagccactgtctttacctcacctgcgctgagcagggccttcagtcagcaaggtggagaaggctctttatggtcacaagtctcttttgcatgtccctggatgtggttagaggacatattcccttatacatacagcatctgaaaggaaaggtcatattagcatccatgagaaaaggtgacatttctaagtgtcacgggccacaggaggtcccgggtggtagaagatgaggattgcttgaccacagtctcccatatgctcgtgctccactgggcgacatttattttgtgtacctgtctcgaggcctaagtaggtgtcagaaccttgccttggagtcatgctggggactggggagatgcgcgtcatcttcgggtggctgttctcggtgccctcgagcttctctcgggcagcgcatagctgcgctgccacctcacgttccacatgctgaccctgccttgccatggtccctctcgcagcccatggagtccatgcatgagaagggcatgtcggacgacccgcgctacaaccagatgaaaggaatggggatgcggtcagggggccatgctgggatggggcccccgcccagccccatggaccagcactcccaaggtacagaactgcgttccttcctgccttgtgtttgtcatactccagagtcctcagatcattttcctcccctgggttcccacaggatggattcagggagtacctaggatgatgtagccgggtgggtggcccgccacagagagctgtctggcatggcgtggctggtgctctgttctggccacctcgtctcggagcagccctggaaggggaaatgctggttggggggcagaccatgttcagcatgggtgatagaggagggctgtgcagggcagcagccccgtgccacccaggaacttactggaaatacagattcctggggcctgggactctgctttaatgagcccagcaggtgccttttctgtacgaggacaattgagaagtgatatggtgggtgactttccaaggccttgctgtcatcaggggtgggaagctcaggggctgcactgggaatggaagtgttgggggtgggcctggcgagcccgaggatgtggaccccgcctgtggacaggcaggcggaagccgggagagagccgtgatttcatgcacaggttctcagcattaaccagaagcaccttactgagacgtgggccaaaccaaatccaccaggtcggctgctgggctgaggtgccttcagcatgtgccctccaggtgcccctggttgactcaagagaaggatgccatttggctgtgccctgtctcagagtaggagctggtgtagggggaagaggctgtaaaaatcacagacatatgctgccgagtgaccagtgggctgacctttctctgcaggttacccctcgcccctgggtggctctgagcatgcctctagtccagttccagccagtggcccgtcttcggggccccagatgtcttccgggccaggaggtgccccgctggatggtgctgacccccaggccttggggcagcagaaccggggcccaaccccatttaaccagaaccagctgcaccagctcagagctcagatcatggcctacaagatgctggccagggggcagcccctccccgaccacctgcagatggcggtgcagggcaagcggccgatgcccgggatgcagcagcagatgccaacgctacctccaccctcggtgtccgcaacaggacccggccctggccctggccctggccccggcccgggtcccggcccggcacctccaaattacagcaggcctcatggtaagactggctgccctggccctcaggtgtctcagagcgaatggctggggcgtgggtggcggggtggacagaccgtgctctgttgccgactgggttccccggtttgggattgcacgggcccatactgcacttctgggtgctcgggtggtgggggcagctaaatgctgcttccccagctccccgcttcccctggggccgctggttaataggtgtatctgctgtgtcccctggagccagggctgcccacggggctgggcgcaggcataaacctgggacgcactgttttctcttttgtttctccctacatgtaggtatgggagggcccaacatgcctcccccaggaccctcgggcgtgccccccgggatgccaggccagcctcctggagggcctcccaagccctggcctgaaggtgagctccctcttctatggtggtgcacccgtgcccttactccccatctcaagcttgggtccttgagatgagctttgtcagggagaaagggccgagggtggtcaggctgaactgcagcctgtacttttcttgtggtggtccccgggtctcccctgtagccagtcagttcccaaaggctgtcgttcatccctcctctgacagcttgtggccttcacccagtccctgagccctgtatatgtaattgctcagtaagtgctgcaggctcccatctgttgggctcaaagaggcagtgggactcattacccatcctcttggagcctgaggtttagcgatgggcattgaggggcaaattgcttccactggatttagttggcactaggaggagatgacaggaaatgctgccatagagccacagacagaacaaaaaggccttgggagcctggggctggccccagtggagggtgtgaaggacgagggtgaggctgagatctggaggaggttggagcccaaggcaggtgtgaaggacacccctgggtgaaaggtgggagatgggcggggtctgcctgtccccagtgcctcaagcagctcagcagctttccatttccagcccgggatgggccccagagctcaacatgacgccctggccccttgccttctcccaggacccatggcgaatgctgctgcccccacgagcacccctcagaagctgattcccccgcagccaacgggccgcccttcccccgcgccccctgccgtcccacccgccgcctcgcccgtgatgccaccgcagacccagtcccccgggcagccggcccagcccgcgcccatggtgccactgcaccagaagcagagccgcatcacccccatccagaagccgcggggcctcgaccctgtggagatcctgcaggagcgcgagtacaggtgagggcggggcccagttgccaaggtcactgccctgtgtcccccatgtccccctggggaagccactcaactttctcccccactctagcaaacagtgccctgtgcccaccactgccacttggcctacacctccttcctcacctccctgctcccaccctggctgcggtctgtttcccacacagcagtttgagttctctctctttttttttttttgagacggagtttcactcttgttgcccacgctggagtgcaatggcacaatctcggttcactgcaacctgcatctcctggcttcaagcgattcttctgcctcagcctcctgagtagctgggattataggcatgcgccaccacacctggctaattttgtatttattttagtagaggcagggtttctccatgttggtcaggctggtctcgagctcctgacctcagatgctcccaaagtgctgggattacaggcatgagccaccgcacctggcatgaattctctttttatgattgatatcagatctactccgtggattaaaacctgcctgtagcttcaattatctgcccaataagctttgccttatgtccactcctgcccagcatccttcctcacccatcccagtctctctgttcctcttttcatttatttaacaagttagacttgttcctgccccaggacctttgcacaggctgtgcatggctccttctactcattcaggcctgattgctggggttccctcctcatggaggcccttcctgtcacttccagccactctctggaattgcagtggatattttattttttttaaatctcctttatggcctgtgttttctaatgagactgagagttccttgctttgttgttcttgtttagtgctaaggccctgcacttaaaatggtccctggcatacagttggtgctcaatgagtatgtgcagaaagactgattaagagaattagcccacataaccttcgcatgtaaccttcgtaaccttcagaccaagcctctagggtcactccgaggggttgcctcagttttgaggtgagaatgctgaggtgtgcagttgaaatagattcccaccgccctgcgcctcatccatgccagagctgcatgaaaaccttggcccgcctgacgccagaacctggctcacaccactgaaaaggcatgacctgggcgcgtctatcaggaatcttgtttgctgtcccctgaggcccggtcctgaggagtgccccgggctatctccctctctgctgtgccctgcggccagcatcctcttctgaggcatctcttgcctcatgactagtgcctgcctctctcgagggatgggtcccctgcagctccagctgtaactgggtgccctggcaaccctctcaccgcctttgctccttgtctctgctcccaggctgcaggctcgcatcgcacaccgaattcaggaacttgaaaaccttcccgggtccctggccggggatttgcgaaccaaagcgaccattgagctcaaggccctcaggctgctgaacttccagaggcaggtgggtgctggcatggccgcagctttccgaaaagggcctttgtcaccaacactgctgctaaggctccaaatacggcttgcctggctagtattacacctgcctgggctgtgaaaagcagccgtggccatccatgggcactcaatcactgcagagccttcctcttacggcctgcgcagtgctggggacgtggacctcactaccctaaagcacttgccgcctcaaagcagacttgtatgggcttctttcttcctttccctttccctttttttttttttttggaaacagtcttgctctatcacctaggctggagtgcagtggcataaactctgctcactgcaaccaacgcctcctgggatcaagcaattcttctgcttcagcctcccaagtagctgggattacaagcgtgtgccaccatgcctaatttttatatttttagtagagacagggtttcaccatattggccaggctggtctcaaactcttgacctcaaatgatcggcctgccttggcctcccaaagtgctgggattacaggcatgagccaccacgtgctgtcctgcatgggtctatttctgagggtactgtgcttagaccctggagtgcagtggagagatcacagctcactgcaaacttgacctcccaggctcatgtcctcctcccgcttcagcctcctgagtagctgggactataggcgtgcaccattacacctggctatatttttcttttttttgaaacagagtctcactctgtcacccaggctggagtgcagtggtgccatctcaccccactgtggcctctgcctctgtggttcaagtgattttcctgtctcagccactgagtagctgggattacaggtgtgcaccaccatgccgggctgatttttttgaagtgcagtggcacaatcttggctcactgcaacctctgccttccaggttcaagtgattctcccacctcagcctcctgagtagctgggattacaggcatgtgccccacgcctggctaatttttgtatttttagtagagacagtgtttcaccatgttggccaggctggtcttaaactcctgacctcaggtgatcctcctgcctcagcctcccaaagtgctgggattacaggcatgagccaccacgcaggcctggtttttgtatttttaatagacacagggtttcgccatgtcgcccaggctagtctcgaactcctgagctcaagccatccacctgtctcagcctcccaaagtgctgggattacaggcatgagccactgctcctggccgcctagttaatttttcttctagtttttgtagaagtgaggtctctccatgttgcccaggttggtctcaaactcctgggcttgagcaatcctcccaccttggcctcccaaagtgttgggattactggcgttaagccaccacacccagccaagagtgttatacttctgaatgactcctaagacgtgtgtgtggtagaggggaggcaagctggaggtccgagaggaccccctggatagatgtccagaagtgatcaccttctgtcctgtgctcgccctgcccgggggcacctgctagacgtcccctgcacacacggactgggtgtgtaaggcacttacaatgctcctttagcggtgaagcatgtgacatcaccatacgtgtttgtcattgtggatgccacagagctgtgcagtgcgcgggcttgtcctcttccctcctacagctgcgccaggaggtggtggtgtgcatgcggagggacacagcgctggagacagccctcaatgctaaggcctacaagcgcagcaagcgccagtccctgcgcgaggcccgcatcactgagaagctggagaagcagcagaagatcgagcaggagcgcaagcgccggcagaagcaccaggtacgctccggtggccccaaggccctgcagcccgcccacctggctgcctggcttgtccagcggttgccacggggctgtgtttgctttgttcctaaacatgctgcttgtctctctcttttgctcattgtaacagtattctaggtactgagagtgtattggtgtaaaaacccaatggtagggagaagatagtgatgaaatccacgcgtagcacgtctggaaggtgatagggcacaaagaaaaatcaagccaggatagagaggaaggaacgggctgttgtagaactgatgttgggggagttctttcttttggaggtgacatctgggcagacccccaaggaagggaggcacacagatctgtgggaaagagctttctgggaaaaggagaaggtgcaagggccctggggctggaatgtgcctgtgttttctctggaaagcaaggacctgcatgagccagagtagagtgagtggcggggagagctggaggaagggagcgcagggaggtgacgagcaggtgatgcagggccttgcgagctgcatggaggatttgggcttttgctctgagtaaagtgggagccatagagggttctgggcagtgcagggactgatctgactcagggtttcccaagatgaatcagtaagacggaaatcttcaaatctaaaatcaagtaaggatttggggatgattgtgctgatttggtcatttatagattttctagagattttctataattaatatcttattggtgtagtgtaaaataatctagacagtcaacacagcaatctctgttaacttttttttttttttttgagatggagtctcgctgtgtcactgaggctggagtgcagtggtgcaatctcggctcactgcaacctccatctcctgggttcaagcagttttcctgcctcagcctacctagtagctgggattacaggcacctgccaccatgcctggctaactttttttttgtatttttagtagagatggggtttcaccatgttggtcaggctggtttcaaattcctgacctcaagtgatctgtccgtcttggcctctcaaagtgctaagatggcaggcgtaatcccccgtgcctggccaacatttttttttttttttttttttgagatggagtttcactcttgtcacccggactggagtgcaatggcacgatcttggctcactgcaacctctgcctcctgggttcaagggattctcctgcctcagcctcccaagtagttgggattacagatgtgcgccgccacacctgtttgtttttttctttttttgagacagagtttcactcttgttgcccaggccggagtgcagtggtgcgatcttggttcgacacaacctctgcctcctgggttcaagcgattttcctgcctcagcctcccaagtagctgggactacaggcacctgccaccatgcctggctaattttttatatttttagtagagatgaggtttcactatgttggccaggctgctggtctcagactgttgacctcgtgatccgcctgcctcggcttcccaaagtgctgggattacagacgtgagccactgctcctgaccaccaacatttttttatatatattatttcagccttttttcttgtatattaatacaaggttaaatagccctttttaaattttttctaaaactttgctttttttttttttttttttgagtcagaatctcactctgttgcccaggctggagtgcagtggcacgatctccactcactgcagcctctgtcttctgggttcaagcgattctcctgccttagccacctgagcagctggaattacaggtgtgcaccaccacacctggctactttttgtacttttagtagagatggggattcaccctgttggccaggctggtcttgaactcctgacctcaagtgatccgcctgccttggccttccaaagtgctggaattacaggcgtgagccgctgctcctggccacatcgctttgtttttaagtatcatggaaacatgacttttgatgtctacactgtattccatttctatgtgtccaggatctaatcatttatgtcacctttttcctgtttgaggacatgcagcatgtttcagcttttgaaaattaaaaattatgctaggaccggaattcttggcttgaacattttggagctggtctctgatatttccttaaaataaatttgtagtaatggaataagttgggtgaagggttggaagcatttttgagacatttcacatccgtgccatgctgccctgccagtcgactgcactgtgtgcctacctgctgtgtttgagggcctttcccacccacagttgccggtgcttagtttgtttttttttttgagacggagtctcgctctgtcgcccacgctggagtgcagtggcgcgatctcggctcactgcaagctctgcctgctgggttcatgccattcttctgcctcggcctcctgagtagctgggactacaggtgccagccaccacgcccggctaattttttgtatttttagtagagacggggtttcaccatgttagccaggatggtatcgatctgaccttgtgatctgcccacttcggcctcccaaagtgctgggattacaggcgtgagccaccgcgccctgccgccagtgctgagttttatcatcagagagagaaacccaaccgcggcaggcaaagggtgtccctttattgttttcataatagtctcgtttttattttatgtattatatttatttttttgagatggagtctcactctgtcacccaggctggagtacagtggtgcgatctcagctcactgcaacctctgtctcctggattcaagcgattcccctgctttggcctcctgagtagctgggattacaggcatgtgccaccacacctggctaatattttttgtatttgtagtagagatggggtttcactatgttggctgggctggtctcgaactcctgacctcaggcattttgtcctcctcagcctcccaaagcgatattctaggtttttttttttttttttttttttgagacagcgtctcactctgttgcccaggctggagcacagtggcacgatctcggctcactgcaagctccgcctcccgggttcacgccattctcctgcctcagcctcccgagtagctgggactacaggcggcccctcaccacgcccggctgattttttgaattttttttgttagtagagatggggttttaccatggtctcgatctcctgacctcatgatccgcccgcctcagcctcccaaagtgctgggattacaggcatgagccactgtgcccagccctaatttttttatttttatttttagtagagacggggtttcaccgtgttagccaggatgatctcgatctcctgacctcgtgatctgccctcctctgcctcccaaagcgctgggattacaggccaatattctaggttttaaacaagccttgcggggagatgtgtccaccatgctgctgaagggtcagccttctcttttgtgctttcctgcaggaatacctcaatagcattctccagcatgccaaggatttcaaggaatatcacagatccgtcacaggcaaaatccagaagctgaccaaggcagtggccacgtaccatgccaacacggagcgggagcagaagaaagagaacgagcggatcgagaaggagcgcatgcggaggctcatggtatggtcctgccttcttgacgtgcgctcttctacatgtgtagctggtactgcgggctccaggggtcactccccagggttacgccaaggcatttcacagctcggagttagaggtgggacagagggaaaagagcaggcgcgggcttgggagtcagtcctgggctcggatatttgctgatctctctgatcatcagaatgactgtgtgacctcaggccacttagccggctcctctgccttctctggaaaatggaggtggtgcccccttccctcgttctgtgagagccaggtggtgtgatccagacccccgacccctagcataaacatctctgaccatttatttgtgactgagtcgctggttgggcagatattggcagcgtgttctgggccaggtgctgctctgtgtacggggacatggcccctgcctttgtgggggctcctggttgtgcttgaggggcagatacgcgaatgaagcaaacagagtagtggatggtgaccgctacagtgaggagggggaagtggagtggaaggggagggacagggtagtaagtaaaagccttgaaacagaggcccaaagggtggccctgatgcacaaacgcagagacccagggaaggagccccaggcagtgcggacaaaggttgaggtggcaggcagccatgtgccagggcagccggtagccctgggctcccagaacagcgttgtgtggggcaggaggtgaggtcagagcttacaggggcaggtgggaggtgggacctttcagaccattgggaggactctgggttgagttctgatcatgaaggggagcctcacccgggagggttttggctgtggggtgatgtgatctgatgtattcttagaaaggtggggggctgctgtaggaggtggtgggagggatgcaccttggacttggtggagagaaggcttcgggtttggggtgtatttcgtggacagagtgggtaggactggctcatggcctctgtaaatggctgctggcgggactgtctgcctagcgggtgcccttggaacctagcccttggtgggttttgaggaaatgattcctgaatgaggagtcgattgccgtgtgaagggctggtggcacggcacccgcgtgagctacgcgtgccctcagtgcgcttctggattgactggccatgggtgctcacagacatgcacattgtgccaccacattgcagtaacccccatgcttttgtaggctgaagatgaggaggggtaccgcaagctcatcgaccagaagaaggacaagcgcctggcctacctcttgcagcagacagacgagtacgtggctaacctcacggagctggtgcggcagcacaaggctgcccaggtcgccaaggagaaaaagaagaaaaagaaaaagaaggtgtgctgggcctggcatggtgcccgccgcgggtgggatgggagcagccgtcttcacgtgtgtggcctcagccttgtgggtcagggcctgaccgtgtctctctctatttccagaaggcagaaaatgcagaaggacagacgcctgccattgggccggatggcgaggtgaggaagcagggtttcttgtggaagtatcaagctagccctaaggcgttggtctgtttcagactttaaaacctgtgttcttttaaaattacgaacaatgatatgtgatgatggtgagaatcccagggtgtcctctgacgcccatcccacccgaccccacatcccacatgttgtgttttcttccagacctttttctatgcatgtgccacaggattcatctttcaggttttactttgttgtaacgtccgacttacaggagaggtgcaagaaccgtccagagatgtcctgtgtgttcttcacccagagtctccattttcacgttttgtgttttgttttgtttctttgagacagggtctctctgtcacccaggctggattgcagtggcggatggctcactgcagccttgacctcctgggctcaagtgatcctacccttcgagtagctgggattacggttatgccccaccacacccagctaagttgtttttttttttgagatggagttttgctcttttgcccaggctagagtaaagtggtgcaatcttggctcattgcagcctccgccccgcgagttcaatcaattgtcctgcctcagcctcctgagtagctgggattataggcatccaccaccacgcccatttaattttatttttatttatttatttatttattttagacggagtctcgttctgtcacacaggctggagtgcaatggcacaatctctgctcactgcaagctccgcctcctgggttcacgccattctcctgcctcagcctcccgagtagctgggactacaggcacctgctaccacgcccggctaattttttgtgtttttagtagagatgggatttcaccgtgttagccaggatggtttcaatctcctgacctcgtgaacatcggcctcccaaaatgctgggattacaggcttgatccaccatggccagccagtttttgtatttttagtagagacggggtttcaccatgttggccaggctggtcttgaactcctgatctcaagtgatccacccgccttggcctcccaaagtgccaggattacaggcataagccaccacgcctggcctaattttttaaaatttattttctatagagacgggggttccatatgtttttcaggctagtctccaattcctgggctcaggcatcctcctgcctcagcctcccaaagtgttaggattataggcatgagcccccgcacctggccttcacctgtgttttttcctaaactctttgagagtcaaatgcagacgtgacagcgccttacctccatgtaattcattatctacttcataaagacaaggttgtttctgcacactgtaccgaggtgacggacacaggaggtgaacattggtacagcactgttatccaatctataggccttcgtatgaggtttggccagtttttccagttatcttcacagcagcagagaatcctgggtcacatttagtggaggtccctttagtcagctttagtcttaaagagctccttgtgtgtgtgtttgtttttttgcagagatggggtctcatgttgcccaggctggtcttgaactcctgggctcaagtgatcctcccacctcggccttccaaaggctgtgattataggcgtgagccaccacgcttggcttcaggccagctatgtcatccagtggccccggactttggtttgtctgatgttccttgtggttggagttgggttatgtgtctctggcaggcagacccaacatggccctgagtccctctcagggtgtcatatcgagagtgcatggcggaggttagcaaataaggtcactggtgatgctgactttgaacccctgccaagggatctccactgtccagttactgtttttttcttttgtaatcagtaagtaccctgtagggagatacttgagactctgtaactatgttgtaactcctcagaattccagctactccttttagtatctttttttttttttttgcctgtatcagtttttgctctgatggctacaggatggtgacttttatttccatcgttctttctgcattgatttgtttgtttttctatagtaggaaaagctttctctttggtcctgttagtcctgtggccatggtctgccaacccctggtgtagacttacggattcttgtttagttgaatgaatggattccgatcctttaaaatgatttcttttggtcatttagctttagccagcaggagccccttgccattggctcctgtttgcttttggtacatgcccaccattcctggagcacttccttcctcatcagacttttcttctgctttccctgcctgagctctctggagccaactctttctccagggagtcctggttccttttttttttttttttgtctgtcaagacggggtctccctgtgtcacccaggccggagtgtgtggtggtgcaatcatggctccctgtagtctcaacctcctggactgaagcgatcctcccacctcagcctcctgagtacctggggctacaggcgcacgccaccatgcttggttaagtgttctgtatttttttgtagagacagggtttcaccatgttgcccaggctggtctcgaactcctgagctcaagcaatctacctgccttggcctcccaaagtgctaggattacagacatgagccactatgcctggctatatttcgtattattacagaagaatatttacatgccaagatctgactttgggggtgcttcctgctagtgggccatcactgcttctaggccctctgagcagccggatctgggaaatagatgtatgtacacatactcatctgcattgctgtttgtatatattaaaacttgtggctgggcatggtggctcatgcctgtattcccagtactttgggaggccaatatgggaggactacttgagcccaggagttcgagaccagtgtgggcaatatggcaaaaccttgtctttataaaaaattttaaaaattagttgggtgtagtggcatgcacctgtggtcccagctacttgagaggctgaggtgggaggatcacttgagtccaagagtttgaggctatagtgagctgtaatctcaccattgcactccagcctggtcaagacagtgagaccctatctcacacgcaaaaagaatcttgaggttatactgacacctccaattctaatccaacagcacagggttaatttttatcctttccgcctttccataattctaaaatcagcaacctgatttcccttagcaataataggcttacttacctgctccattttagaatacacagaaagtacgttccaaagtgctaatggacacctctatgcagaagtctcctagttagagttcagtatttatagagttcctctacctcaggatatgtgttccaaatactgtgtccagaagttactggggccgggtgcggtggctcatgcctgtaatcccagcactttgggaggccaaggtgggcggatcacctaaggtcaagagttcaagaccagcctgaccaacatagtgaaacctcgtctctgctaaaaatacaaaaaattagccaggtgtgggggcacacgcctgtggtcccagctacttgggaggctgaggcaggagaattggttgaacctgagaggtggaggttgcagtgagccaggttcatggccattgcactccagcctgggtgacagagtgagattctgtctcaaaaaaaaaaaaaaagaagttactttggaccaggtgtggtggctcatgcctataaccccagcagtttgggttgctaaggtgggtggatcgcttgagcccaggagttcgaaaccagcctgagcaacatggtgaaacctcatctctacaaaaaattaaccaggcttggtgcgcacgcctgtagtcccacctactcgagaggctgaggtagggggataacttagcccaggaggtccaggctgcagtgcactgtgtttgtaccactgcattccagcctggggagctttttattacttgagacagggtctctctctgtcagccagttctgtctcacagttctgaagccatctggaggactcaagaaaaaagtaatgggccaggtgcggtggctcacatctgtaatcccagcactttgggaggccgaggcaggcagatcatgaggtcaggagttcgagaccagtctggccagtatggtgaaacccagtctctactaaaaatacaaacattagccaggcgtggtggcaggcttctgtagtcccagctactgggaggctgaggcaggagaatcacttaaacccgggaggcggatcacaccactgcactccagcctgggcgacagagtgagactctgtctcaaaaaaaaaaaaaaaaagtcatgaagtgggaaagtgcatgaagtgggagcttgtgctcagtcctgctgtggctgcctgtcctgtggagtgttgagaacaggcaccggcacttgctgctgcttgtgggttttcttgttctcggacagtggtactcagcctctgttgtgtgttctagtcacctggggagctctctattattattactactattatttgagacagggtctctctgttgtccaggctggagtccagtgatgaggtcatggctcaccgcagccttgacgtcctgggctcaagtgatcctccgaggacctttttctaagtagtagctgagcatgaaggcatgtgcctgttgttgcagctgctcaggaggctgaggtgggaggattgctttagtccaggagttcaagaccaacctgggcaacatagggagactctgtctctccaaaaaataaaataattacctgggcatggtggtgtgcacttgcggtcccagctgattgggagccagaggtaggcggatcacttgagcccagggctttgaggctgtgatcacacctgtgaataaccatggtactgagcccgtctccaaaaaataaaaagtaaattaaaaatcttaaaaagcgaggatgcccaagcctcactccagaggagttcaatcagaattttgggtgtaggggaggcatgcagcaatcggcatctttgactgctcctcccagtgatcccagagaggatgtggagttgaaagtccctgactgaggcagcctgcagagcccattgttggggtaagaggttgctcttatggtggccgctctgtgggtgagcttttagcgcgtagagactgatatccctccgctgtgtggacggtattgacactgtgagcgcagcagttttgcaggtagttataaattcctggaagatgaaaaccaaaatttaaaccaataactttttctccatcctggaagttttttctaggaaatatacaagaattgatgagggagaaaatgtttatccattgaatctcaacaggaggagtttcatatttgttgctaagaggaattatttttgaaatatttcaattagctttttaacaaaaaagaatgaggacccttgatgagatctacaaatagagtataagtgggggaaaaaatcaaggtccaaagaatgtaaattatataaccgttagtgtaaaaaagagggagaaagtggaaacgtctaagtccttgtttcttatccatggaattgatctggaaggatggacaggaaactgataccagtggaaaactgtgaagagaaaaacttaggctggagcacagaagaatggggagagcccacatgatgctcttcagttttcgttaaaaaaataaaaatgggccttgggaggccgaggcgggcagatcacgaggtcaggagatcgagactgtcttggctaacacagtgaaaccccgtctccactaaaaatactaaaaattagctgggcatggtgatgggcacctgtagtcccagctactctggaggctgaggcaggagaatggcatgaacctgggaggtggagcttgcagtgagccgataccgcaccactgcactccagcctgggcaacagagtgagactccatctcaaaaaaataaataaataaaaataaaaaataaaaatgggccgagcatagtggctcacgcctggaatcccagcactttgggaggccaaggcgggtggatcacatgaggccagaagtttgagaccagcccggcctgaattttcagctatgagtgtctggactatttgaaaattacaatgtatatgccagttaccttaaagaaacaggtgttgggagactgaggcagagaattgcttgaacccaggaggcagaggttgtagtgagccgagagccgagatcacgccactgcactctagcctgggtgacagagcgagactccgtctcaaaaaaaaaaaaaaaaaaaaaagaagaaacaagtgtcagccaaggttgatgggttatatatttttactggattactgagtatacagtttacgcattttcccaccactggccatgtttgcctgccattttctgtgcaaacagttgagtgggtgcttcccaccttggcctctgtaagtgtttggtctggaggccctgcaacctcagtgtcacacgaatgactctttttcagcctctggacgagaccagccagatgagcgacctcccggtgaaggtgatccacgtggagagtgggaagatcctcacaggcacagatgcccccaaagccgggcagctggaggcctggctcgagatgaacccggggtgagttgggccttgcattccagatgcagtggggatccaagtcctcggtgggccttgttccagggaggtggcagccaggagcaattttacttctgtttgaattcccggcaggtttggtagggaaagtgaattctgctggctctgagcagatttgtatgaaagcccttacattttttctaggtatgaagtagctccgaggtctgatagtgaagaaagtggctcagaagaagaggaagaggtaagagtgcatttcctggctttcaaggctctcagtgcccactggcagtgacttccaccctgtgtgttgtgaccgtctcctgccctggctgggcatcttgtggggcagggaacagcagggcccaggcctgcccgaagtcggtgctttagagctgtcctatccaatagggcagcttctggcgacatgtgaccatttccattttaaattaaatcagtcacattacataaaatttaagactcattttctctttcacactggctgcatttcaggtgcttggcatcccttatctgggaatggtctgcctcatttgcccattttttttttttttttttgaaacggagtctcactctgtcacccaggctggagtgcactggtgcaatctcagctcattgcaacctccacctcccgggttcaagcaattctcctgcctcagcctcccaagtagctgggactacaggcgcctgccaccacgtccagctagtttttttatgtttagtagagatggagtttcatcatattggccaggctggtctcaaactcccgacctgaagtgatccacctgcctcagcctcccaaagtgctgggattacagacatgaacctccacgtccgacttatgatttttttgttgttgttttgaaatggagacttgctgtgttgcccaggctggagtgcagtggcgcgatgttggctcactgcagcctccacctcccgtgttcaagcgattctcctgcctcagcctccctagtagctgggacttcaggcacctgccaccatgcctggctaatttttgtatttttagtagagacagggttacaccatgttggccagtctggtcttgaactcttgactggtgattttttttttttttgagacagagtctcactctatagcccaggatggagtgcagtggcgcgatctcgctcactgcaacctccgcctcccgggttcaagtgattctcctgcctcagtctcctgagtagctgggattacaggcgcccgccaccatgccagctaatttttaaaatatttttagtagagatggggttccaccatgttggccaggctggtctcgaactgctgaccttaagcgatccacccacctgggcctcccaaagtattgggattacaggcacgaaccagtgcgtcaaagtctgttctgtgttagtcactctaaccctcttatgattattgttcacatggtacatctttttcccttcttttactttcaacctgaatctacaacagcatatgggttttgcattttcagctagtatgacagtgactgctttttgactgagtttttaagaccatttatatttactgtaatttctgatatgattgggcttacatttgctatttcttttctatgcctcctgtttttgttcctcctttactgccttttgtgttcaatgttttttttccctagatttttatttttatagtgccttttttttttttgagacggagtctcgctctgtcacccaggctggagtgcagtggagcaatctcggctcactgcaatctctgcctcccgggttcaagtgattctcctgcctcagcctcccgggactacaggtgcatgccaccaaacccggctaatttttttttgtatttttagtagagacagggtttcaccatgttggtcaggctggtctcgaactcctgacctcaggtgatctgcctgccttggcctcccaaagtgttgggattacaggcgtgagccaccacgcctggcctctcctatttttttgcttacctcttcatgtttagttgaagcgtactttagctaccctggagtctgacttttaaaactctgggaggttgtggtggcgtctagtctgtttagtaatttcctggggctcagtctgtgaaatctggttcctgcatagtgtgtatagcctctgctgtatttcctcaattcttttaaacattttttggttttatcttattcgtgatttttttcctggttcattaggggcaggcagtgtttctttgtcacttagtggtcatccaaagattggccacagtttgtgctcagacacgcgccttctttctcctgctgatggttcagttgtatgaggaggtgcattccacatttgggccattgtcgggttctccctggcacttatgctttgctgagtcctttggcgtctctttgcatatgcacagactcagcctcagccagtgatacgcttttccctaccgtggctgatctcacctccattagcagtgccactggctgtgggcattgcttccttctacaagtgactgagccccttccacctccctgccaagcctcatggcctgcagctctccagctgtaagaggttcatgtgtccagagctgaggcagaagaagtgaaagtggcccacagtaaaagtgctacaaactcccactcttcccacctgaagttcagttttttaaggttcaatgattctagtagacctttggtcaactcgctgagctctgaaatgctcactctgtcaatttgtccggctttatagttgcttttggggaggaaatttgcccacctcctcatttgggtttagccagaagtctcactcctattttaattccagcatgtctgtaccagctctgattttcttgcctaaaatgtcggtgttattaccacctgtttattccaagtgatctgtaaaatcattttttgtgacctaagggaaatcctactggcttttcactggaattatttaacagattaattgcagatcatatttttaaagctttgtagcagttccattatagatgagggaacaatcaactgtgttgtatttgtaggatttaaatggcaatacaagaatagtttaagataaggaaatgcattcttgtctatgttatcaatatgtgttatgcaaaatcgcagtaaaggctggaaagccattaaatgatgcaacatgaatgattaaacaagttcgtagataacttgcagtaaactgagatgcctcttgtcgccagtgttatcagacatattgtagatggttgagacttgtcagtaaagctggaagtaaattacaagcaataaatattgaaagttggttctaagatatttaaagccaggcgcggtgtctcacgcctgtaatcccagcattttgggagggcaagttgggtggatgatccaaggtcaggagttcgagaccagcctggccaacatgatgaaaccccgtctctactaaaaaatacaaaaattagccggggtgatggtgggctctaagatatttaatacctaggaaatccaagagaatcaactgataaactgctttagtaggtcagcagagaatagacgtgtaatgttcattgtataacaggggtaggagagatatggagtctacttctaattagtaatgaaagtccacaataccctgagatagccttaaaagaagcgtcggggccgggtgcagtggctcatacctgtaatcccagcactttgggaggctgaggcaggcagattcttgagctcaggagtttgagaccagcctgggcaacatagtgagtccctgtctctaccaaaaatgcaaaacaattagccaagtgtcatagtgcacgcctgtggtcccagctactcgagaggctgaggtgggaggatcgcttaagtccagtgggtggaggtagcagcgagctgagatagcaccactgccctccagccagagtgacagagcaagaccccatctcaacaataacaaaaaaaaggaagtgtcaggaatctgtggtggggaaaccaaaaacggtttactgggctgggtgcggtggctcacgcctgtaatcccagcactttgggaagccaaggcaggcggatcacgaggtcaggagttcaagaccagcctggccaacatagtgaaaccccgtctctactaaaaatacaaaaattagccaggcatggtggcgcatgcctgtaatcccagctacttgggaggttgaggcaggagaatcgcttgaacctgggagctggaggttgcactgcgccgagatcacgccactgcactccagcttgggcaacagagtgacacttcgtctcaaaaaaaaaaaaaaaaaaaaaaagatgtagccagtgtggtggcatttgcctgtagtcccagctacttgagaggctgaggcgagaggattgcttgagcccaggagtttgagaccagcccggggaatgtcacgagactacatatctacaaaaattcaaaacatttgagctgggtgtggtggtgcatagctgtagttctagctgctggggaggctgaggcaggatgattgcttgagctgaggagttcaaagccatctgggcaacatcctgagactcccatatattaaaaaaaataataataaatacataattttaaaacaaagatgtaaataataaacagcacacattccaggataggtagagggggtgagggctgtaagaagatcacttgcttctgagactgttctccccatgggagtcccgtcccccctctctgggggatgaactgaggtgacatgggcttgtctcttggtaggaggaggaggaagagcagccgcaggcagcacagcctcccaccctgcccgtggaggagaagaagaagattccagatccagacagcgatgacgtctctgaggtggacgcgcggcacatcattgagtaaggggtcccgacacaggttgttctgtgccagcttcctgtgaggtggcgctggtgggagtggctagaatcccagccatccctagctgacattcagcactgtccagccagctgctactgtggaactacagagaccaaatttatttacttcacatttcatgtattttatagggatttaatagagcaattgcattcgcatggttcaccatatgcttacgaggtacagtcaggtgtgcgggagaagccctcctcaccccgttctctgctccccggctccctccctttccactaccctccctggggaaactttccagccttgtgtgtcatcttccagagatgctgtctgcattagcaagcaaaatgtgcatatttttgtcttcatttgcatacatatctccagtgtacattggtgtgcaccttgttattttcactgaaccttccctcttggaggtcatcctgtgtccgtgcagagtgcttccagtctggtcctcagcgtgcagtgtcatactgcgtcacgttatattctcattttcgtagcctgtcctttggtgacaagcgtttaggttatatttgtcatcttttgctcctgtaacacatcacagttaacacagtaatctcttcattgcttatggtaaggaattaatagatcctgttaaaaagcaagtgagggctgggcgtggtggctcaggcctgtaatcccagcactttgggaggccaaggcaggtggatcacttgaggtcaggagttcaagaccagcctggccaacttggtgaaaccgcatctctactaaaaatacaaaaattagctgggcgtggtggcgtgcacctggagtcccagctacttgggaggctgagacaggagaatcgcttgaaatggggaggaggaggctgcagtgagctgagatagcgccactgcactctagcctgggcaacagagggagactccatctcaaaaaaaaaaaaaatgtaggtggataaaagtcacttttttttttttttttttttttttttttttttttgagatagagtcttgctcttcaccaggctggagtacagtggtgcgatcttggctcactgcaacctccacctcctgggttcgagtgattctcttgcctcggcctcctgagtagctggcacaacaggcgcgggccaccacgtccagctaatttttgtgtttttagtagagatggggtttcaccatgttggccaggatggtcttgatctcttgacctcatgatctacccactttgagctcccaaagtgctgggattacaggcgtgagccaccgcacctggccagagttactttttaaaagaaaaacattcagattagattacaaattgcctaagttttaacagctctggttttgtatgaacctgttcagtctgtgtttcttttcacctttaggctcatgaattgttcttagaaagggtgggttctatgatgatcagcatctggctaggtgcagagtgtctttctgtgctgtggcaagtgacagcattctatttgttgttttgagacagtcttgctcagtcgcccaggctggagtgcagtggctcgatctcttgactcactgcagcctctgcctccgggcttaagtgtttcttttacctcagcctcctgagtagctggggttacaggcatgcaccaccacgcccggctaactttttttttttttttttttgagacagagtcttgctctgtcgcccaggctagagtgcagtggcacgatctcggctctctgcaagctccgcctcccaggttcatgccattctcctgcctcagcctcccaagtagctgggactacaggcgcctgccaccacgcccggctaatttttgtatttttagtagagacggggtttcaccatgttggccaggctggtctagaattcctgacctcaggtgatccacatgccttggcctcccaaagtgctgggattacaggtgtaagccactgtgcccagcctaatttttgttttttgtagtagagatggggtttcaccatgttggccaggctggtcttgatctcctggcctcaagtgatccacctgcttcagcctcccaaagtgttgaaattacaggcgtgagccaccacgcccatcagagtgacagaattcttgtactgtggtggtgcaatcaggacccagagctcccaggagtccagtctggacccctcaggcttagtgcgggctgccctgcctggcctcacactgtccggctgcacctctatgtgtcttacagtgctggccacaggtcattcagcagaaagggccactccgcagagcttgtgtcaggagccagcacattgtcacagataggaatgtgtgtccttacccggcacctccatctcactcccaggaatgccaagcaagatgtcgatgatgaatatggcgtgtcccaggcccttgcacgtggcctgcagtcctactatgccgtggcccatgctgtcactgagagagtggacaagcagtcagcgcttatggtcaatggtgtcctcaaacagtaccaggtgaggtagggggtggggaggccaccgccacgtagctgcctcggtgcaggtgttcccaggtggtgcgggcttcagacctcaggcagacctgagttcaccttttgctctttgtgggcaatgcactcttcccctctgagcctcggtttccccatgtgtaaagcagagatgtggtctggtaggttagctgccaggaggacgtgcaacagcagaaagtcagtgtctactgggtgcccgatgtgccaggcagagtgggagcgatttgcactccagtggcctcacagaggagacggggccacctgaggagcagagaggtgcagcacctcctcagcatcgcaccgtgtgtaggactgaaccagggccggagctcagatctgggcatctgcatgctcaggacaggttacctgagctctgtgtggtgtgaaacggcgagcgtcaggagcttagatctaggagccggcagccctggactccgctctttcttctggggatgaggtagcaggtcctgtgtgagggtgaaaagttggtggctctgaagctcttcacctgggcctgacttgggacagtcacgaaacagagctgctcatgctcttaatgcggcctgccatccagagctcattacaaggccccacaagacaaccagtacaactccaaccaaagaacagctctctctggttttcaatttggttgtttcttttcttttcttttttttttttgaaacggagcctctctgttgcccaggctggagtgcaatggcgcgatctcagctcactgcaacctctgcctcccgggttcaagtgattctcctgcctcagactcctgagtagctgggactacaagtgcgtgccatcacgcccggctagtttttgtatttttagtagagacagagtttcaccatgtcggccaagctggtctcaaactcctgacctcaggtgatccgcccaccttggcctcccaaagtgctgggattacagatgtaagccagtgcacccagccccaactttctttaagacaactcttaaaccttttgtgctagtatcaacattcaaagctgcacatgcacctatagtcccagctacttaagaggctgagatgggaggatcgcatgagcccaggagttgaaagtgggcctgggcaacatagtgagacactgcctctacaaaaatattttaaaaattagctgggggtggtagcacacatctgtagtcccagatagttgggcggcttaggtgggaggagagcccgagcccaggacttctgagctgtagcgccctatgtcgatcaggtgtctgtactaagttcagcatgaatatgatgaccttccaggagtggggcaccaccaggtggcctaaggaggagcgaatctgcccaggtcagaaatggagcaggtcaaaactgatgtgctgatccgtagtgagatagtccctgtgaagagccactgcactccagcctgggtggcatagcgagaccccatctctataaaacaataatgaaacaaaggcaaagctcatggttagtggaattttccaagagtcccatgcaattaaaataattagaacttggctaggcgcagtggctcatggctgtgatgccagcactttgggagaccaaggcgggtggatcacctgaggtcaggagtttgagaccaggctggccaacatgatgagaccctgtctctaccgaaaatacaaaaaattagctgggcatggtggtgcatgcctgtaatcccagctacttgggaggctgaggcagaattgcttgaacctgggaggcagaggttgcagtgagccaagatcgggccactgcactccagcttgggtgagagtgagactcggtctcaaaaaaaaaaaaatgaattagaacttggccagaacttacttcctcaatccattacgaacatttccaaattttccttcataacgttatcttcagtttgcaaatagtcttctgtttaaggcctgtatttcagaaagctcccaggctttggaaatccctctcttaatcttgaaatgatgttcaggcagtgaattcctcacgaagtcgccctgaagccctcttggtttcctgagtgcaagtgtcccgtggtgtgggcaggtttttcctgtgtgctgtgtggggcatggacaggcagacaatgtaacaggtgggagtgagctgttgagatgtgtattagaaatgtcacacgtgtccatcgttcgcacagtcatcctgcagcttcacagacgttattgctaaggatgaggctaagcgataaagaatcagtttggttcagaggaaaaatccgtggtaaaggcagtagagggtgggatgtggcttaggcagaactcgtggctggcggtgtcttgactctctgaagtgggaggaccctctggtgtccgacccggccttcagtcctggcgtggccgcatctgtccttgcagatcaaaggtttggagtggctggtgtccctgtacaacaacaacctgaacggcatcctggccgacgagatgggcctggggaagaccatccagaccatcgcgctcatcacgtacctcatggagcacaaacgcatcaatgggcccttcctcatcatcgtgcctctctcgtgagtacccgctgccagcaacatcccacacgccgctcacacgctcctgtgtttgtttcctaagtttgccgcagtagaataccacaaacgaggtggcttaattacagaaatttgttttcctggaggccagaagtccagggtcaaggtgtagcaggttgcttcctcctgaggcctctcttcctgcttgcagggatacgtgcttacatgtatctcactgtgtcttcacatggtccttcctctgtgcgtgtctgtgtcctcatctcttcttcttagaaggacatgggtcaggttggatgagggtgcatcctaatggcctgctttaacttcattgcctctgtattggccctgtctccaggtacagtcgcatcctgagctgctgggggtcaggactgctccaccagcctcggggctgtgcacagctccacccgtcacagcctctgcctctgggtcccggatcaagtgggggcatgactgtgcatcccctccacccctggggaggcctggggtccctctcccgggatgtccttggtgtccttttcaagtcccacaaccagcaaagtccatgcaggggagtcgcaggagacaagaacctcccactagaaaagtagggtgaggccattgaggctccattgaacagtctctacttcctcactgtgcagtgccctgcaagggccaccagagccctcgggcacatcccagcatggcccaggtccttgggcatggtgggatccggacaccctgagaggctctcacttgccactgcctggctccaccggcctttttctccctgcaaacagagtccgcccccctgcccacctctctcgacatctctctacccagctcagcccctgcactaaagggggacctgcctagggttttcccagaaagccccagggccggctcttactggtccagttcaagtcacatgtccagcaagcagacagtcaccggcctgggggttagtctggtctgattgggcaaacttcagcatagcatttggtctggccctagagcacagcccctaactccaaccaggcactcattgggaccactacagccacgagtcagcagcggacccccaactcctggcaggctggggagcggcatgcccatgctccaaccccatgggaaaatgcccttctgcctataagacagccaggccccatgggtcacacacccatagggtaggcctgacgtcctgactgttgcagggaggactggaggaaaggtgaggaccccagaaccctcccaggtttactgtggaactgtttctttcttctatctccctgcttcctacgtggcgggtagaacagactgctctgaaggagcagggcgtccttgtgcacagcgctgcaggtagctgcacctcccctcgtggtcagacccagattgctacagcgttcctgctgcacctgcctgagctctgtcccctgtctgtgtctggaggctgttccttccggctctgcccacctcctggctcccctctgcccttcttcccctggaggctgatgggtgcagtggcagtcgccctctgcagttcccgattttccctcctttcacttacagacttctcagatcaccatctctgctggaacgccgctctccagggtgctgttgttttgcagccttggttcttagttgttaattttttgctttaaaaaatttttttaaacttttcattttgaaatgatctcatttatttttatttttttttattttttgaggagtctcgcactgttgaccagcctggagtgcagtggtgccatcttggttcactgcaacctctgcctcctgggttcaagcgattctcctgcctcagcctcccgagtagctgggattagaggcacgcgccaccatgtccggctaacttttttgcatttttagtagagacagggtttctccatgttggctaggctggtcttgaactcctgaccccatgatctgcccgccttggcctcccaaagtgctgggattacaggagtgagccactgtgcctggcgacctcattcttagaaaacattgtagagttagtgtaaagaattgctatgcacccttcacccatcttccccattctttcataaccccaagacaattatgaaaaccaggaagataacatggacgtaggactaatagcaaaccagaggccttatttaccaatcttgtcagttttctcacaagtggccttgctctggtccaggatcccacactgtcacgtctgtgtggcatgcctgtggcagttcctcatttcgtctttgtcctggtcgagcttgacgctgttgaatcctgatcggacctttggtagactctccttcaatttgggtttgtccgatgtgatcgcgtggagcaacaccacgccctgcttgatgtgccttagcggggaaggcatgagatgttgaggccttggtgtctcgggcaaggtgcctgctgggtttcccactgtaaacctaggagttacactttccgttaataactgtctcgtgggaacgtacttcgacacttgtgaatatctcatttctcttcctactttcctcaataatttcagcatctcttctactccatttcatgttgccataaaggaatacctgagactaggtgataaagaaaagaggtttagctgggcgcggtggctcactcctgtaatcccagcactttgggaggccgaggcaggcggatcacctgaggtcaggagtttgagaccagcctgaccaacatggtgaaaccctgtccctaccaaaaatacaaaaaaaaattagccaggcatggtggcgcatgcctgtaatcccagccactcaggaggctgagacaggagaatcacttgaacctgggagacgggggttgcagtgagccaatatcgtgccattgcattccagcctgggcaacaagaatgaaacgccttctcaaaaaaaaaaagaggtttatttggctcatgattctgctggctggaagactgggcacctggtgagggcttcaggcggattccactcctggtggaaggcaaaggggagccagtgtgtagagatcccatggggagggaggaggcgagggaggcgggggtgccgggctccttttaaccatagctcccacgagagttcagagagcaggaactcattcatcccccatccccagtacagtacaggccgttcacgagggttcacgaggccgttcacgagggaggcccccatgacacagatgcctcccaccaggccccacctccaacattggaaatcagacttcagcatgaggtttggaggtgccagatacccaaactatagcagcaaacgtcagataagtcttgcctgaaaaaataattacatgagagttgccaaatacatggttacctgtttctgtccgctcttctctacaaattaattggaattccaccgttaggaagagctttcccgtctcccccatgtgcttgtttgggtaattattatatcagtgtgggcgtgaacaaatattatttattttgttgcttcagtttttttcagatttggcctgggagaattctccctggaagaattgtgtcttctctatgtattcagtcatttgttaatatgagtatggacccacggatatttatttagtactccaggctacgcaccagtggctgggttttttttgttttgtggctcaaatccatccagctttggccactgggagtgctttcagttggctcttctgtcctttgacacgcccccagcatcgggtgaattttgaggactttcttgctttttggcaccaagagatgctgcaggctcatgtagtctatttcccgcccactccctcaaatcagccatttctccaaggagccctggtttcccttcttacagaatggttttgggaaccaagacctgggtcctggatgggcctgttgcttctggggtgtcattgctcctggggccctctcagtggtcagtgctaggagattcatgtgcgcgtgctgatgctttgtgcacgtatcgtctaaaaggccttctctgcctcggcatctgtttctgtgttaagctgaacgtgagttcataccactgtctgcggctctgagtgaggaccacaggttccttctcacacttccaccctgtgtgtgcgcccattctcagcttccgtggacaacagtttcagagtagtgagccggtacctccgggaagcatcttgagccactagagcgcaggccttggggccagttccttgtgtgttcagacctccagattgcagtcagattccatttccagggtgatagaggtcaccttcttcccctacttcagtgaggttgtgaggtgggtgctcctgcagtctttcccactgcgccccacctgggcaagcgtccatgctgtggaacgccagctcctgcaggccagaagagggcccgcgcgctaggaaatgtttacggcgtatgggcatccggctgtgccggccctctcactgggaattgctgcctcctgccatgagctgcttgtcctgcctccgtttggacctctgtctctgggacctgtcccctcagtcccctcctgacccttgctcctggctcttctccctcccagtgcagatgctccgcacacctccggcttctcccttggtgcgctgactgtccccatcactccagggaggtttcactgttcctgagtcagcggaagcacagggtcaggccctacgggccaggtccggtggctccaagatgccatcagggacccagcctcccccaggtttctgcccagtcattcttgggtgactccaaccctcaggctccttacctcatggttgcaggacggctgcactgcctccctcgcctcatgcaggagagtgggcaggaaagagttctaggagagtgggcagggcaaaaggcagcagaagcgcaaggctgctgagcctctgctccccacgcttcttcaggaactctccccagccttcaccacagccatgcgtccttctgtctattggctgtgccgcctggttggctgtggcttccagcggggctggagatgggttcatggtggacacagcacctccctcgtggagctgcttgggggcaaaccacgagtagtccctgggactccagcttcgagccctgtctttacggaccaccccgtctagactttctgagtggcttccctcccccactgaaaactccctgccccagagttcctcccagagcccgtcccctttgggactcagctttattaccgcctccaccctctcctcagtctctaggctgtcggtctcaggtgactcacccctccccactgcattctgcctgcccccatgtcctccctcattccagccctggtcatcccacaggggaacagccacgagttgccgctccctcccatccctgtcctcccgcctgccacctgagccaggccccgcctcgcccctcactgtcctcgttctctctcacagtcaggaaccttccgtggctggagggtggcagaaagactgtttggtgtctcctatatcctcaggtctccacagcactgttgctagcctggctctgggcgtgaagcctgtgctctgaagctgcattttcccggcagcaggtccaggcttccccagccctggcagcattgtttctgtcccccatcacatctctgtgtccctacttctcactctaaagggccttgccctcttttcccagtggcctcccttctgtcctctgaggcagagcccttcacgtcctcgccagtctctcttcctccctccctccctcagctgccctaaacacagtttctctgcccactcggagggctgtggccatgttggcctcgcccctgacagccagtggctatgggtttgcacagtgagccattgatgagagaccggcacttgactctcatttccttgttccatcagaacgctgtccaactgggcgtacgagtttgacaagtgggccccctccgtggtgaaggtgtcttacaaggtaggtcacagccactgaggtttcctctcttgctacggaggtgcaggcggtggtgggcaggacgtccacacatacctctggacagtgaacctgagaatgctgggtctccagtcgcatggagtctccaggacagcctggaactccagtcacatggatccgggagtttggactgggcagggacagggcagattagctcactggggaggagacaggagtgagcatggtggccagcactcagaggccagctcaggcgcctgagatggggacccaggaagaggggagcctgtcagccaccaggaatgtgcagatggcggtgcaggctgcgtggttccctcaggccccggccgccgctggcctgcactgcttcctcttccccctgcagcgcgtgttctgcgtggtgaggtctggggacgcgccagcggccctgccagcccctttccccactacccctgtgaggacgagccctcccgccgtgtcactgggcagttgcagggggtgcctgtgcccctcttgccacctggccacccggctccaaaagccgagctgtgcatcctgcttcccttgcagggatccccagcagcaagacgggcctttgtcccccagctccggagtgggaagttcaacgtcttgctgacgacgtacgagtacatcatcaaagacaagcacatcctcgccaaggtaacgtgtccctgtgggaaatgccaggccatgggccgagtgctcacacgtgggtcacgctgcccgtctcctccaaagcccctacaagtttcttcccggagtcccacctgcatgtgcgtgaagacagctgccctgtgtaggggaaaggcctaggtgggggcgacctcaggtttacctccctaactgtctccaggcaggccctgagtcaggcccagaagctggggccatctacacagcatgcgctctgcctcctctcgggccttctgcccagagagcctcagcaccaaggcgtctcctgacccgcctacagagtccccatggggccttggccagaccagtcttgtcctcctgtctcattgccttggccgtccctccctggggccctggcttctcaccacaggccatgggctgagattcagcatgtgggggagagctcgagggccaaataccatgactgcctgctggccttgggcagctggttcgggctgttctgtgagggtcctactgtcctggaagcctcttctgggacgaaactgtgaagggagtcccagcgtggccatgactgagaatacggcccagatagaaaacagacatagccctctgcctccaaaaactcatgttcctcatttgaggaggggtaaagatgtacctggtctcacccctaaacatccagctgagtgagtgttgaacagtagagagttttttgcgttttggtttttttttttttgagaccgagtctcgctctgttgcccatgctggagtgcagtgatgtgatcacagctcactgcaggcctgacctcctggcctcaagcgatcctcccacctcaccctcctgagtagctgggactacaggtgtgcgccaccactcccagctaacttttttaaatttattttttatggagatggggtcttgctgtactgcccaggctggtctcaaactcctggcctcaaggaatcctctcgccttggcctcacaaagcactgggcaactgtgtctggcctaacagtagagttcttgacccaggtatggggggatggaggagctgtttatgggtggctccgcctctcagtgcatggctggagtgacagtactggaatactggggctgtgaactgggtgttttcttttctttttctcttcttttttttttttattgagacagagtctcacagctgtcacccaggctggagtgcagtggagcgatctcagctcactgcaacaacctctgcctcctgggttcaagtgattctcctgcctcagccttccgaggactgggtgctttatcccggagccaacaagggaggaaactgaggcccagggagctgggtatcccacgtgcaggctcttacctcaggtccatgcttcaggtgcctcctttgtggctcacccctgctgactccttacaaagccaggccgttggcaggcacaggaaccaggctctgaaaccccgtgctcccctgccagtggctcagttgatgtaatcaccctgcagtgggagtgctctttgagtgcggccactgcgccccctcccgacccgcatggccctgtatgtagtggcgctggcccctaccccatggggcccacattctgaaccacaggctgctcattagaaatgtaccgtcaccaacccagttcccctgagaccctccacaccagcaggacaagtcccccagtcagcaagatgtgtcttctgccagaacgtgctcggcatttttctgtgctgtagattcatatgtgtgattttgcagggaagccagattgcttttttgcaatttgcattgttcacctgccaatagtcatggggtcacgggcctgtctctgcccaaggcttgcaagaggctacgttgtgtggctccaactcggtgagtcagccccggggcaggacgtcaggcctgtgctctccacccagctgcgctcttccacctggagccttcctggctgctgggcgcagagtgggagattctccccatgtgccgggccacctgctgccccctgccctgattgcccactctggggcccgcagatccgttggaagtacatgattgtggacgaaggtcaccgcatgaagaaccaccactgcaagctgacgcaggtgctcaacacgcactatgtggcaccccgccgcctgctgctgacgggcacaccgctgcagaacaagcttcccgagctctgggcgctgctcaacttcctgctgcccaccatcttcaagagctgcagcaccttcgagcagtggtttaacgcaccctttgccatgaccggggaaaaggtgggtttgcccagctgtgcccatgctgacggttccaggtgcggctggctttgctggttggaacgtgttgagcaccagctacagctggctgggcctgtgctgggtgcctggtgagagtctgcatctgcatggagcaggggagccctggaacccaaggctggggcagccacaagggccccaggggagcagggcagaggtcatggtggtgaatctcggaatgctcggggcgtctctgaccctatgctccaggtgcagagtggatggtgaggaagatggccctgaggcagctgtgggaccgcaagcgtgtggagagcacagctagaggctgtagcgtgctgtaggcccctttaggtgccctcagaactcaccctcagggcagtgggaaggaaacttggaagattccagttagcggggccacatggtcaggttctgtcttacgttgttttcaaaaagctcagtggccagtgtgtctcaatgtctgggtggcaccatcagccagactgtggcatggcagcatcatcattgatgagtggtcccacaccagcactgatccctgagcctagagctccttgctgttggaggttgaaactgtgggacagactgtgtttcctgctgaggggtttaagtaaccagatgctgaagtgtgggcagaactacagaggttacctcgaagtgccctgcccagcacggctgggcccacccccttcttcccaccttagacaggtccagggcagctggggccttcctggcctcatgcgtgagttccctgccctctcggctgctggtcaaggcagagactcttctgatggcgaaaccgaggcattccccaaagcctcgtgataaaggagtccccaatttttagactcccgggacccccacactaagggccaggatctgatgctatagttttgtcactttctgagccgagcaaaagctctgccaaaggattgccagggaagcaatagaagaaaagttttggcgtcgtctcattttcctttaacttttttaattaaaacattttaaaagttaattattagtagaggagtaggcgccgtgggaggtcagggtttctttcacctggttccacccaggctgaatgagagtcccttggggctcccggtggcagagccctccctgagaatcacccgctataagccccatgtggtcagcctggcccctgcagcgctcctggcatgagcttggcgtggggtgggtctgtggacactccagtttgtgttactcgtggagaagcagcatgcccgctgccgggggtctttctggtgaggcacagggagcagagtgctctgggtactgcggttccatgtcccaggaattacatggagggaaccagatcctcacagtttcctaaggaagagggtgccctgcctggctcccagaaagcataaagcaggctgaaaagccacgtgccaagggcaagatcaccccaggggaccccgtccaccctgtccccacatccgcaccttctagtgagacctctgtcgccctcctttggaggtaacgcttgcttctcctgtcttgggggcttccaggtggacctgaatgaggaggaaaccattctcatcatccggcgtctccacaaagtgctgcggcccttcttgctccgacgactcaagaaggaagtcgaggcccagttgcccgaaaaggtgatggagttttgaggggagccaccagtgaagcagcctcacgtgggggctttctccagggctgggcgtgctcagggcctctccccacagtcccaggcctgccctggtcaatccagcttgggggtggcgatgacgccactgggtctgtaaagccctgtgctgctgttgtagggattgaaaagcactcataggctcacatagctcacaataggttagagcacaaaatcccacttcctgtcagggggccaggtgcctgtgcgggctctcctggccacatcaggaggggccgtgggcttggggttgccccccggccccccatcatggctctgggttttcaaggcctgctgcagccacacccctgggcccagttcccacagcaagacccatggactcggggtccccggctgcagttgtccctcttggctctttgtttcctggctggctgtagagaggcccccagaagatggctggggggccctttctggcccagtaaccctctggtatctctgcctggtgcttcctctcattgcccaggtctcccctcttctccccagctgtgagggtctcctcacccacaccccagtgtgctctggtcagagctcatatgacagggccgagggggtcagagctgggttcggatggggggagtcaggcctcaagccaccttgggccctcgtgagcattatgtgtcccctgcaggtggagtacgtcatcaagtgcgacatgtctgcgctgcagcgagtgctctaccgccacatgcaggccaagggcgtgctgctgactgatggctccgagaaggacaagaaggtgggccccagagtcccccaactgcattccccactgggtgtccaaggccggcagcgtggcaggcagagcagagcgtgctctgaccatcgggtcatgatctggtcatgatccccagggcatctggccagccctggttatgatggctggtggcttgtgtcaggacacactgactcagctgccagtggcttctcctttgcctatgaaacactggctccttctgcaattggcagcctgggcccagcactaaccccagcagggttagagtgttctagaatgccccccttctctgttattaagtgaaaggaagggagcgggctgtctcctgcaggggctgctctgagaatcccaggccccaggccccacctgcctggctctcctcaccagcagtgaaattatcctcccaggaaatgcaccagaccccttgattctgcccccaaggccttgacctcggcctggcttccccgagacgttgtgtctgtgccccttctcccctgagctgagcagcagtgtgttccctagtccattcccagcccagagcatgcaccccccgccccgcccccacctccttcctcatcctggagcccagggagccctgagtcatggctcacccggctgaggccctcttgcccagctgagaccctctagggacccccacagtaacagtgcccagaacaaagctggcatcacaaagcatcggggactctgcctcagccctttgccagtcttgtttccgtcccgtcctgctggccctgtccctgccatctgccctctgctgtgccaggcagtcatttgtttcccagggcttgttgggggcctccgggcctccagcctgccatctcctcactcccaattgctgtgccaaaagccactcttccccactagagcgtccccatggcccttctcccaacacccacccatccaccaagcccaccccaccccaggagggcaagaccccatttgggtccctctcatctgccttccagggcaaaggcggcaccaagaccctgatgaacaccatcatgcagctgcggaagatctgcaaccacccctacatgttccagcacatcgaggtgagcccgccgcggctgggacggctcaggccctgctgtctgctgagctcctaggcagagctggcttctcctcgacagctctttaaaaacagactcgaatattttcattaggtaatgcctgtacatctgtctctcatttggtcttcgcttcaccagtgcttacgggaagaatcccagcagttagggcgcaacgtgcgataggaatatagggccctgaaagcttgccctcagagagcaggagcgtttggagacttctctggggatgtgtccccccacagtggggtcctgctgcgtctctttggctcactggcttttctcacgttgcggggcgtcaagagtcaccaccgtcttcagtgaagtgtgggggagtcagaaccctttttggtcatggtggctttgagaatctgggttcttagaagcatgcatatgttcgtgtttcttggtgtaaagtgtcagggtcgttggagaccgcctgctgccccgagagcccctggggctgtctcagcaccctgagcgtggctgtggccccatgacgtcctcgtgcattcagggtgtgaagagtgctgtatgggatgtcctttccttcgttggaggagtgtgagggaaaggatgtcagtggactaagaaagatggttttggcatctgtgtctggtctcagagccgccgtgggcccgtgccgagcacacagtgtgggggctttgtcctctgagcacgagcggtgtgtgcggaccgcagcggggcccggtggcctgctcctgcctgtcactgacccctctctccttgccttgcaggagtccttttccgagcacttggggttcactggcggcattgtccaagggtgagaagcttcccaactggatggggtgggcaggtggtccacccagaggttttctgtcgttttgttggctttattgctgctgttatgttgtccaatttcaaaggcagaaaattagaaaatacagaagaatccaaagcaaataatacaaatctttttttttttttttttttgaggtggagttttgctcttgttgcccaggctggagtgcagtgacacaatctcggctcactgcaacctctgcctcctgggttcaaatgattctcctgcctcagcctcccgagtagctgggattaccggcacctgccaccacccagctaattttttgtatttttagtagagatggggtttcaccatgttgaccaggctgatcttgaactcctgacctcaagtgatccacccgccttggcctcccaaagtgctggaattacaggtgtgagccaccgcgcccggccccattatacaaatctttagtgcttggagagctgaccactattaaccccaagagacaggattcctgaggcagacctggcttacagatcccactctgccgcctccaagctctgtgactctagacagctttcttaacctctctgagcctaaactctgctcactagtacagaggcactctttacatcatgtgggtgttttctatagcaccctttgtaaggggcagcccagactcctttaagcccctaatggatgtggatgctgtgtctagattttcaccattgcaaagaaccttgctaaaagcattcttccagctaaagcctccattcaattcccctggggtagtaagccatttgcaagaagagaggcgcctaatgaaaacatcacaaattctttttgatgtgtttttttatactgagttgtggaacagggtcctgtacacctggcttcaaggctgggaggcctggcttggacatgtggtcagccatatcacgtcgtccccctgccagcctcagtgtccacatctacaacacttggggtttggctggagagaacatgagaagccgaggtggcccttccttctgggtctagcagagcatgggtgtctccagtgtggcatttgctcctggggcttctttatcgggcaaggggacaaggtctggcttcccggagcatccctgttccagccccgtgttgtgccggccatgtgactcacagctcctctcattttcatgagtgtctgggtttgacgagaaatacatgtgccaccctggtgatacgcctccccagcgagggtggccgggcttatttcagttgggggaaatggctttgctgaagctttgggtgggtgacgtctgcttaggatgcatgtctgtgcccttgaacccggcgcctggcctggaggcgggcgatgcacctcctgccttacctgcctgcagggttccaggtttaacatcctgcgccttctctcctgcctcctccacactccaggctggacctgtaccgagcctcgggtaaatttgagcttcttgatagaattcttcccaaactccgagcaaccaaccacaaagtgctgctgttctgccaaatgacctccctcatgaccatcatggaagattactttgcgtatcgcggctttaaatacctcaggcttgatggtgagtatgagccagtgaggcgtttcttacagggttttgttgttgtggctgccacagaagctcctcactggcattccctcctgtgaggcagggtgaggcccaggcgctctgggtccagtggccagagtgggcctagccacaggctgagcatcttgggcactcggcactgggacaggccgtggattggacgccgggtgtcctgactcctaggctgacagtctttccacgacaatgctgggcgcactggggaaggggtgccctgtgcacttttagctggaagtgacagaattccataccatgtggacacaggaaagaaagcaccaataggcttacatagctctaaccccaggaggttaaacatccttcaggcacagctggatccaggcatgcaggtgatattggagagacttttctccagctctttgctctgccttcttccatcttggcttcctttccacctgctcagtgtccccaacaaaggcaggtcccaggctggctctcatttagctgctgtgagccgcatgcccatccctgggccattcgtagcagcccagtgactgccaccttgccacaggtcaggcctggacctggaatcagactctgtggtgagcacggagggagggaagcaagcactgccaggcaggagcagcagctgccgtagagaggctctcagcccaaccccctgccctgcggtccctgatgggaaaggtcaccgcctgtgtttctgcgcctgcctgccccagcacacgggagctcagggaggagaggctgtgagatgccgacagggcacgtgagacatgtctgtcagtcccagtgggtcagggagccctggagtgagttcttcgtgggagttactagaactgggcttacgagaaacacgagcatgagctgctgagacagacacggctcagccagtttgttgttccctacacgacctcccagagcctttgttgaagctcctgtgcaaggtctgtctcacagcaggacaccccagacctccataccccttgtcccgttgatcacttggacctgtgtttgctgggccaacctgcccaggtgccacccggagtgtgccctgtgtgtccctccaaactgcaggtcctccccggggttctgtccaggaccactctacagacacgagtctgttgcaggggtctccccggcttgccttcttccttgggggcttcccactttcagctttgaggctgaaaaccaaaatccttcagggtcctcatggccgggccaccccccaccctttcctctcctacggtctctccagcggcttctcccgtcctcgagagggccaaggcttcctgagggccatcccgtctgtgtcgtgtccctgactcccccaggagagagcctggttcccacccatcccagtgcccttctgcctactccataaggacaaggactttggtcagttgaactacagatgtgtcctctgcatgtgatgtggtcatggccacagggccagagaatccattgcgagtagaggaagggtaggagctcagtgaagtctcctgagactgcatctcccatgggtgggctggcatctgggagccgggtggcccctcacctcagcccctcctccgagctggagtagcaggggcacatctggtgcctgagagagggtgggacggcaggtggatggccaggctactgtgggcttctgcaccgtgcctgggcatgtgtaggctggtggcaggaaatggccagtttttatttcttcttttttttgagacggagtttcactcttgttgcccaggctggagtgcagtggcatgatctcagctcactgcaacctccgccgcctggattcaagcgattctcctgcctcatcctccctggtatctgggattacaggcgcccgccactacgcccagctaattttcttgtatttttagtagagacggggtttcaccatgttggccaggctggtctcgaactcctgtcctcaggcgatccacccacctcagcctcccaaagtgttgggattacaggcatgagtcaccgcgcccggcctgccagtttttatttcatcaccaaaatgacttcagtgttcaggggcacctctgtccgaactcccagcagcgcagggagtgttgacattgccttaatgcccacaacgctgagggcatcgtgggttgtcacccaggagacctgctctggctccttgacttgggttttctggggcatggggacactgatcctgccagaaaggacacgagccccctttataaggtctccatgcttttaccgtagaagattctctttgtgaaccacaaaactttttgagacagggctgaaggcaggtgcacccacagtcactgtccacccacccccaggtcccttgtgttgcgagcggcggtgttgccggcattggccgctgtgtcttccgctccccatggaatggcacagggtagagtagaggagagaatccagggctgtggtggtggtggctgtgctgacgctggacgctgtggcctagctgtgggctgggtgctggactctgtgctccaggcccacctcctctagttctcccagcggggcctgttttcatttctgggatgtgtggagagacgttttgtggtgaaacactggaaatccagttattcgccagtggcccacaggcccgtgtggagagtgcggagccagggatctggggatgctggcaggtgctgatcctgctcctgctctcagaagcaggtgttccttggtgtccccactctacccctgaggtcaccccgctgaccctgttctcctctgtgcccgtcaggaaccacgaaggcggaggaccggggcatgctgctgaaaaccttcaacgagcccggctctgagtacttcatcttcctgctcagcacccgggctggggggctcggcctgaacctccagtcggcagacactgtgatcatttttgacagcgactggaatcctcaccaggtaaaagcgggccgggccccaggtcgaggagaaggaagggggtgcctgcaaaacctcgaggagacggccctggcttgagggtcctccagcctcctccacattgtcttggaccccaggagccgggaggagctgcacccatatctccataggtcatcagggagaaaagaggcggggtcctcctgtttcccaaaatacaaacagcctttccctctgattgggaaagcagtgtataagccatccgtcggtttggtttttcttaaatcttggaatggcacccatgaggaggtggaaagtatcctgatcaatctgcgccgtcactgtggggcggcccctgcagtgtgccctgtgagcacacacactggcgcttgttcagacacaattgggggtaaactccatgccacttcgtttacttcctcctcttgttccataaccatgtacccctcatgggcctcggcatcggtggataccaggtcatgctgttacatagctacaagaatttgaaaatgagttaaacttttctctgtgtttcattataagactgataagttcttattgtttttaacatgtaaacaccagtgacagtcaggagtcccttttcccttcctctccaaccgtgctctcttctgagcctctgccagcccatctgccttcgcacatgtatgtactgagattaacacagatgcggcgtggcctagcatgtgcctcttccaccaagcagtgggtgtcaaccgccgagtgcacatcggaagctacccagccatctaatcggccaccaggcgtcccggcagatggccacccctggacgtctgctctcaaactctggttggcaggcatccgtcttttctgttgatcagcctggtcaccaacccagcagggtccctctttctctcagagtgcttgtgcaaacaccctaggtctgcgcagccctcagacatggggtcgctccaccccagacattgtcctcttcgtgttctggttgctactgccaaagtggtttcactcctacgctggggtgtgaatgtaccctgcccttccctgcagcgtgagggcagcagcgttctcagtgtgtaaattgtcgcttgtctgatgggtgaatgccgtggtggtcactggtggccccttttacgatcaggctggggtgtagcttctgcccagaccctggtgaccagccagtttcttaggaggtggttgagttgtgtgtccccgttggcaggccggcagcaggcggaagctgcacctcagggctgggggcgcgttggggagggctggccctgccaggaagtgtgctgacagggcaggagggctgagcggcagacacaaggcactcctggtccccaccagctgtggcctctgccaccccatgggtgccagtcttaagtttcagagcatcactggtactcaccctggtcctgcagctcctgggcccagagacaggatttcgtgttagcctcctcgtactgtgctggggtgatgataaaactaacaacccaggctggacgcagtggctcacacccgaaatcccaacattttgggaggccgaggtgggtggatcaactgaggtcaggagttcgagaccagcctggccaacatggcgaaaccctgtctctactaaaaatacaaaaattagccaggcatggtggtgcatgcctgtagccccagctactcaggaagctgaggcagaaaaatcgcttgaacttcgggaggcagaggttgcagtgagctgagatcgcaccactgcactccagcctgggcgacagagcgagactttgtctcaaaaaaaaaaaaaaagaaaaaaagcccatccacggcacctgcattgttgggagctaactgcaccagtcactgggccacactcctggtgcttattcactcattcgaggtatgcagtagccacgggttgggccccatgtaggctgagggagttttgaggctcacagaggtgagacctggttccggttctgtgtgcactgtgagagtggcagggcccacagccaaaccaagcactgccacaacacggccgagcttcggccccctgttgtaaatggtgctcgactgtgtaggtccacgctgtggggagctgtgccgctgccacgggagctgcttgagaatataatcccctggggggttggtgctttcttcccgaatatctgtggggtcccaataaggtagaaggtggcacttctggaggaacgtgatgagagtccccttcccccgagggacacatggcggcccaggctccaccagctctgttttcatgcggcggcaggtcaggctgggcagaattgtcaggccgagggtggcacgcacagcacacctctccagctagtgtcagaggccaccttcccttttatgacctcctgggctcctttgggactgactggcacctcttcccccaggacctgcaagcgcaggaccgagcccaccgcatcgggcagcagaacgaggtgcgtgtgctccgcctctgcaccgtcaacagcgtggaggagaagatcctagctgcagccaagtacaagctcaacgtggaccagaaggtgatccaggccggcatgttcgaccagaagtcctccagccatgagcggcgcgccttcctgcaggccatcctggagcacgaggagcaggatgaggtgagcccagcaccggccccgacccctccccagcgtgaatggtggacgcgtgagcggctttcatttttgtttttttaccttttttgcactcttattttttttgcatccctttggagtaaagggagtgtgggctgaacggaaagaggatgagtacttgctttttctttgaagtggtttttttttctaaactgctggtgaaagacgccggattgacagccctggagactgaagtcctctatttatccacagagcagacactgcagcacgggcagcggcagtgccagcttcgcccacactgcccctccgccagcgggcgtcaaccccgacttggaggagccacctctaaaggtgagaggggtagttcagtctccatgcccattcaatcctcggcttctcggctgagacggccagcaagggccctggtcccacggagcgtgcgtgtgcgtgtgcgtgtgtgtgcctttcgctgccgtgtgggtccccatccaccgcagccgtgccgggaccaccagctcattcccacggacgccgccgctcgcctctgagctcggccgccgcccaccccggcccctcctcagcggcactgacagtttgcaatcttataggaggaagacgaggtgcccgacgacgagaccgtcaaccagatgatcgcccggcacgaggaggagtttgatctgttcatggtaagcgctgcaggctggatggggcagttcaggcatcccactctgctgccaccaggagcaaagcagacgtcctagtgcccatggtggtatccctagcaggtcagggagccagggacagctcacagtgcagcccactcccacctccagactgacccgtcttccacccccagtctcctgaggatggcatcggagggcgagatgcacacccagccttctgcatgtgacccgagacctgccccaccagctctgttttctaacgggctctccagggcttcatgcactccctttcagagggagttcgccctatccaaggccaagggactgaccaggccttcagtcgcagagcccccttgcccctgggtgggaaacaggaaataagccacccaagcaggggccccttggcccgcaggcctcatgcctccaccaacgctgggccacgcagctgctgcccccctgctggggtctgcagccctcttgtgcaaccttccatcttttcgagtttcctctgcctcctgaggcagagcctctagtcagggtctgacggagccaggccaggtcagccactgaaaaatcgagagctactgtttaactctcgcagcagcgtggagccccacgggcagagaaaggcccttctgaactctcggtgttctggctctagcgtgcccctggtgcctgcatgctgatgcctctcccgttgcctccctgcccaccagcgcatggacctggaccgcaggcgcgaggaggcccgcaaccccaagcggaagccgcgcctcatggaggaggacgagctcccctcgtggatcatcaaggacgacgcggaggtggagcggctgacctgtgaggaggaggaggagaagatgttcggccgtggctcccgccaccgcaaggaggtggactacagcgactcactgacggagaagcagtggctcaaggtacatgctggagaggcccagcagctgccgcaggccagcgccaggcagggctggggagacaaagggcccaccgccaggactcaggcctgggtccaaaatgctttccttgggccactcctggccaggctccgcaggcagccgagagccttccgatgtgggccagggatggtcaggtccttttggctctgccttggaatgcaagaaggacccacggttcctgagcagctcaaaacctgctgctggttatggttggtctttcaagtaaaagggtttacctcttcccgaggttaaaaatcatgttgctgatctcagtggactgctggctttcccagtacctgccaggagggaggcacaagggtgaatcatggactattgaggcgccctgcaaagcgttgcactgctggctgcaggcagcctcactttgggcaagtccccccccatgagctggggagactcagtcatggggagggaggagagggcaagcccccaagggcctctgaacctggcaggtgctgcacggggctggcagttgcttgtggagctgacgtgagggcccgttctcagcagatggcagctggccctgcaacagcagctgcagatgtctttgagtcagtcgtgcggtgctcctggggcttcacccgacccaactttcccagcccaaggcacactgtgacagatgcctggcactgatgtcctcactggggttacggtgacagatcagaccccttcccagctcaggggctctgagttatagagacgatgattcagaatccatccctgaagttgtgtcataaaaatgtcctgaagcaataattccgagaaggcaggtggcagcttttggctatgccatgcaaagtgccacacccaggaaagagccatgtggcctagcccatgtggccaaacagccccggttccctcctgggacctcagcagcccagactcatgagcttgcctgccaagctgtgcaccagagggcgctgttgaaacacaccaggagcccaggtgacagacaggccatcctgttccccagccagcctcccaagcacagcgctccaggacccagaagagaaaccctgaaaagacagtgtgagccctgccacagacctgtgtgacagcagagctgtttggctgctgtatgagtgtcaccggccctgcatttttttcttttttaataaagacaaagtcttgctgtgttacccaggctggcctccagttcctgggggctcaagtgatcctcacacctcagcctcctgagtagttcagactacaggtacacaccaacacgcctggctaattttaaattttttgtaaagtgggggtctcactgtgtcactcaggctggtctcaaactcctgggctcaaacaatccacccgcctcggcctgcagagtagctgggattacgagcatgagccacggtgcccagctcagccctgcatatttgaggcagtgagtaccttttaaatttaagatcagttcatacgtggctgctctatgtacatttttttctaggtgtaatttacataccatacagttcacccttttggggtatatgatacaatcatcttcagtgtatccaagagttgtgcatctctcaccacagtccattttagaacattctcatcgcccccaaaagaagccctgccccgatttgccattcctggtaattcatggattctccccagccccaggcaaccactgatgtactttctgtccatatagttttacctgttctgggcgtttcctgtcagtggagtcctacagcgtgggatgctttggtgtcaggcttttttcacgcaatgtaacatgctgacccatgatgcagcaggtgtgttgcattctttgatggtgaaataatcctgcctcgtacagatttgtcacattcggtttttctgtccattcttgatggacacttgggttgtatccactttcgggctattacaaacaatactaccgtgaacattcacgtacacgtttttgcgtgcacgcgtttctctttaatatgtgatttctctttaatatctgatttctctttaatatgtgcctaggcgtagagttgccggaacaatgttagttctctatttaaccttttgagggaccccagcctggtttccttggtggctacgccagttcacagttccaccagctgtgtatgagaattcctctttctctacatcctcagcaacccttgctgttccctcgcccgctgattctagccatcccagcacgtatgaagtgccatctgagtgtggttggatttgcatttccctgatggctaatggtgtggagtatctgttcatatgcttcttggccctttgtgtatcctctagaaagagatgtctagtcacatcatcctttacccaaatttaaaatatatttatcttaatattgaattgtaagttatttacaagtgccttatcagatatcatttgtaaatattttgttccattctgcacattctcttttcgcttccgtgatatccgttgaagcacagaagtgtttcattgtacttacagtcgatttttctttttcacctgtgccttggtgttgtatctgagaaaccatcgcctatccaaggtcacgaagacttgcccctgtcttttctcctaggagggttataatttgatctcttccatgtagatccatgtaagatccattttgagttaaattttatacatgatgtgaggtaggggtccatcttcatccatccaactggaaatccagttgtcccagcagcatttgttgaagagactattttttcccattgagcccatcttattacacagtatattcaaattcacagttgtgaaaaatattatacaaaacactgtctccccactactgttggctgtggaattggcaccacttttctggcagccatctgttgccaagtgaactcaaagccttcaaaatgctcctatggccgccatcggacatggccatgactgtggcagcctaaagcaacagaactattttctctgcattctgggccagaagtctgaacccacggtgtgggcagggctgtgttcctttcgaggccctaggagaggacccttccttggcttttccagcttctgatggttccagaagcctcctggcttggggcagcgtcaccccatctctgcctctgtcttcatggggacttctcctctgtgtccccttctgtgtcttttaagaacaatttttaaaacttaatcccaaaagtaaagacctcatttgcaaagaaggtcccattccgaggttccaggtagacatgagtctggggggcacccgccgctccgccctgggtctgcagggggccttctcctggtgcctcctgcctgctgtgccctccatgctgcttctttgacccggttgccttccatcctcctgggcccctcaggctctcagcttcccatcttctctaagacatgtctgctccatcattctggtgtctctctcttccctccttcctggcacctgacacgtttgttaccccacttgtggggtgttgctgtctgatcaccatcttccttccaagggtaggggaaagggccctggctggttcaagtcacagctctgtcctcagcgccaggcacagtgcccagctcactggcacagcctcagattccctggacacctggctccccggctgcattttttaccattgggataagttattagtaccattgaaaattaatacctggggattctcttaatattgttcatattcatgttcttctcagcagttttaccatgaggaatctgtcttaaacaatgtcagttgtcaatagcgttatttaaaatagcaacaacaataaaaaaaggtggtcagacctggcagcttgtgcctgtaatcccagcacttggagaagccaaagcggggggatcatttcagctcaggagtttgagaccagtctggccaaaatagcaagacctttgtctctattaaaaaaaaaaatgccaggcacagtgacacatgcctgtaatcccaagcactttgggaggccgaggtgggcagatcacctgaggtcaggagctcaagaccagcctggccaacatggcaaaaacccgtttctactaaaaatacaaaaattagccaggcatggtggtgggcacctgtcatcccagctacttgggaggctgagtcaggagaatcactggaacctaggagttggagtttgtagtgagccaagatcgcaccactgcactccagcctgggcgacagaatgagaccctgtctctgaaaaaaagggaaatgacctaaatgcccaagaacaaggggaggctaaattagggcacgttgtgcactgaaacactaaacagacattaaaaaattttgttgtagaaaattacaggaaaagatatccatgacacagccagcagtgtggcacgtgggctacaattccagcgtggccttcagttctgcacacgtgcgtcaaaggtggggagagttctggtggtgggtggcgctgagggctgcacaacactggggacgtgcctaatgcccctgaactgtgtactaaaacatggctgctttggtaaattttatgttatatatgatttataatatatttttttaaatgcccagctactcaggaggctaagatgggaagatcacttgagcccaggagttaaagtccaaccagggcaatgtagcaagaccacatgtctaagaaaatttaaaaatcggctgggcgcggtggctcacgcctgtaatcccagcactttgagaggccgacatgggtggatcacgaggttaagagattaagaccatcctggccaacatggtaaaaccctgtctctactaaaaataccaaaattagctggacgtggtggtgggcgcctgtagtcccagctactcaggagggtgagggaggagaatcgcttgaaccaggaaggtggaggttgcagtgagctgagattgcaccactgcactccagcctggtgacagagcgagactgcgtctcaacaacaacaaaaaagaaaatttaaaaataatttttcatacaaaaattagccaggtgtggtggcacgtacctgtaatcccaggtacttgggaggctgaagcaggagaattgcttgaacccaggaggcggaggttgcagtgagccgagattgcaccactgcactccaacctcggtgacaagagcgaaactccgtctcaaaaatataaaaataatttttaaaatgtcttaaaaaggccgggtgtggtggctcacacctgtaatcccagcactttgggaggccgaggcgggcagatcacaaggtcaagagtttgagaccatcctgaccaacatggtgaaaccctgtctctactaaaaatacaaaaattagctaggcgtggtggtttgcgcctgtaatcccagctactcaggaggctgaggcaggagagttgcttgaacccaggaggcggaggttgcagtgagccaagatcatgccactgcactccagcctggtgacagagtgagactccgtctccaaaaaaaaaaaaaaaaaaatcttaaaaagaagaaatagatggaggccaggcccagtggcttatatctgtaatcctagcactttgggaggctaagatgggagcactgcttgagaccaggagttcaagaccagcctgggcaatattatgagaccccgtatctacaaaaaatttttttaattagctgagtgtggtgacacgtgcctgtagtcccagctacttaggaggctgaggtgggaggatctcttgagccctgggagttcaagactgcagtgagctatgatggtgccactgcactccagcctgggcaacaggtcgagaccctgtctctaaaaataaataagtaaataaaagaaatagatggggagagtgtggaacagaggtgtcaacatcacctccgggtgaagggatttcaggagcacgttcttttctgtacagagaagatagttctttttttttggtcaagaaattcaaccattagttttttaaagacaagcttgggtggggtgcctgctgggggcagtgctggtctttcactgcagcccaggcaccccttgagagtcccagtgtgtgttatgccccgagccagtcaagctgaagggagagcgggtgcgggggccctcctccgtgtcccagcccggcccctgggattgcgtcgcggcctctgcttgtcgacctgggtgctggctgtcctattttactactattgaccctgaaggccatcgaggagggcacgctggaggagatcgaagaggaggtccggcagaagaaatcatcacggaagcgcaagcgagacagcgacgccggctcctccaccccgaccaccagcacccgcagccgcgacaaggacgacgagagcaagaagcagaagaagcgcgggcggccgcctgccgagaaactctcccctaacccacccaacctcaccaagaagatgaagaagattgtggatgccgtgatcaagtacaaggacaggtaagcgaggaggcggggagggcgggggctgtaggggtccccgtgggagcaggcctggcatctgcactctgactctgcacactcaggcttgggccgctcactctttcactcatccacaaacactgactgaatctctgtgtctttgagcctggccctgaggaacatgctttctggaacagggaagcacacatgtatctgcggtgatgagagggaatgtcacatgtggtcgagaggagaggcaggggtgcgggtctcggagaaggggacattgcagcagagccttgagagaggggaggttggggagagtgcaccagcagaggccacagcaggcggagaggctctgccaaagttgtggcctggtggcctcaagggatgaggtgggatgaggggttatatggcagtaatgggtgctgcccgtgtggccaggaggttggggacaagaggctggcatgtctggagcagagaaagtggcagccctctcctgtccttgcaccctcccaggctacctgtgccatctctgtgttggtgagatggtggccacactcctgctctctgccaggccctgctccaagcctggagatcgctgtcctcacagacatgtcctatatacgaggcagcatgcggttccagctgtggccacggcccagcggcggatcataacgtgttggtggatcatgagtgccatttatatgtttttcatttactaatatccttttccgtgagcgactctatatgggtaccatttaaataagaagaaaggaatgttctcagcaactccccagggaggcatgtgcaccttctgccagcccagggcaggtcacagagctgggcaggagccagcaaaggtgtaaggcccatgcctggcccaggactcacccagtcttccactctccaaggtcttatttcacttcctggtacacactggccagtacggctgtccccgtaatgggagggttgtactgtttgattttaaataacagtttgctgttagtcatgaagcagagcgtgggggaattgtatctgttggaggggaaagtgaagggagcccacatgcatggtttggagagaatcttaccaagtgtgaagttttagaggatggtaacaattggagtgcctaaattaatgagtcaaaattaccgcgcaaggccagctgtggtggtccacacctgtcagcccagcactttgagaggctgaggtgggaggatcacttgaggtcaggagtttgagaccagcatggacaacatggtgaaaacccatctttactgaaaataggaaaacaattacctgggcgtggtggcacgctttttgggaggctgagacaggagaatcacttgaacccaggaagtggaggttgctgtggaccaagattgcaccactgcactccagccttgggtgacagagcaagacgcccactccaaaaacaaaatactgcttaaaaaggttcttttagccagatgcggtggctcatgcctgtaatcccagcactttaggaggccaaggcgggcggatcacttgaggtcaggagtttgaaaccagcatggccaatatggcgaaaccccctctctactaaaactacaaaaattcgccgagcgtagtggtgcatgcctgtaatcccagctactcgggaggctgaggtaggagaatcttgaagctgggaggcggaggttgcagtgacccaagatcacatcagtgcactccagcctgggggacagagtgagactccgtctcaaaaagagaaaaaaagaaaggttcttttattattggaagagaaacagatgatgaaggaaaggagacatattcaagttcaatgccagatctgaaaatgtcatgtgttgtcagtattgagaaaaaaatatatagactctaattcacaaacctaactccaaggctaagtcctcaaagaggaaagcaagtggaggacttaagttacttaaagtgcgggatacagctgcgggcagtagcacatgcctggggtccccactacttgggaggctgaggtgggaggatcacttgagcacagcaggtccaggctacagtgagccatgatcacacagctgcactccatcctgggtgatggaatgagaccctgtatcttaaaaaaatgaaataaatacagaatacttatttaaaacatgggccaggtatagtggctcgtgtaatcccagcactttgggaggctgaggtgggcggatcacttgaagttaggagtttgagaccagtctggccaacatggcaaaaccccatctctacaaaaaatacaaaaatagaaattaaactggcatggtgatgcgtgcttgagctcccagctcgggaggctgggcacgagaatcgcttgaacccagaaggcagagggtgcagtgagccaagattgcaccactgcactccagcctgggtgacagagtgagacaatacctgaaaaacaaaaaacaaaaacaaaaaaagggaattcgcagaaatctaatgacaatgacagaccctccccatgttttatttctaatgataatcttgtgagggaaacttaacattaccaacctaaagaagacccttgaagcgcagtggggaaagcacgggtgtctccatcacactggtctcctgggtatccacgtagagaggatgagcctcgaccacccccacacacgcacacaccatgcacttggatccacgtgacatggactgtggatgtaagaacgtgaaaggtaaaacaaaattctagaagaaagcacgggagaaaatcttcatgagtaggcatcgatttcttccacgggagccaaaagccactaatcacaaacaattgagaaattagacctcactgaaattaataacatctgtttattaatggacacgctgatggagacagtgaaaactcctcatagatgaggaaaagacaacacaatttaaagctggacaagagccgggaacagacgcctccttacacaggacatcccaggactaatcaatgtggggaaaggtgctcacgtcattgcattagcatcacaacttcaagaaaatgctcgttaaaaccagagtgacttgcaccagcacccgccccagaacggccgaatgcccatcagtgctggcaagtctgaagcagtctggcctcacaccctgcgtgtaggagtatgcagctctttggcaatctcttctgttttgctttgtttgtttttaaccatcgaactgcagaagataatattttctgaggctcagcctgtacataccctctgacccagcagcctgcagccctcgttctacccaggagagctgagtgcatctgtccacaccgacagacgtgtccatagccactttggtcataatctcccaaaacaagaatcagcccagtgtccatctacaggggcatggatcagtggaggcctaatcgtacagggccccaaacagctgtgaaaacagacatagtactgctacctggaagaagcttacattttgttgagtgaaagaagccagacactaaaaagggcatactggccgggcacggtggctcacgcctgtaatcccagcactttgggaggccgaggcgggcggatcacgaggtcaggagattgagaccatcctggctaacatggtgaaacaccgtctctactaaaaatacaaaaaattagccgggtgtggtggtgggcgcctgtagtcccagctactcgggaggctgaggcgggagaatggcatgaacccaggaggcggagcttgcagtgagccgagaccgcgccacggcactccagcctgggcgacagagcgggactccgtctaaaaaaaaaaagagggcctactgtgtgcctccagttctgtgagggtcagaagctgatccacagtaatggctgccaagcagtgcttaccttgagagagggaatagcaggaaagccacacgacgagccttctaggatactggggatattctctctatagatctggatgtgtatatgatgtgtacattcaccaaggtgtacacatgagatatgtacacttctctgtattccattacaccttggtttttgaaaagacagaaacagcatgctcagcttattaagaacctgaatattttcagacaaaaagtatgtctagtgttagtccacttttttttttttttagttttagactcacagagccctcttagggtcatatttagttgtatatcatctgacaaaagagggaatggctcacccagctgctacagtcagtcttgtagcctttgtaagatttgatgataaatcatacaataaattaaaactttcggctgggcacagtggctcacgcccataatcccagcactttgggaggccgaggcggaggatcacttgagcccaggagttcagatgagcctggccaacatagtgagactctgtctctatttaaaaaaaagaagaaaaaaaaagtctgggtgtggtggctcacgcctgtaatcccagcactttgggaggctgaggcgagcggatcacaaggccaggagatcaagaccatgctggctaacacagtgaaaccccgtctctactaaaaatacaaaaaattagccaggcgtggtggcgggcgcctgtagtcccagatactcgagaggctgaggcaggagaatggcgtgaacccgggaggcagagcttgcagtgagccgagattgtgccactgcactccagcctgggcgacagagcgagactccgtctcaaaaaaaaaaaaaaaaccccaaatcttaactcttactgctaagtgactgctttatcgaaactgttctgtttcgggacatttgattctggtagagattttgagacctgctttgaagaggacaccaacatttcagtcacacagcaatgctcctgtcttacctgggatccatgtgggaggatgcctcagtgggggatttgatctgtgttttcaatttaacctcacatcttactggaatggatggattcacagacctgggggtcgcccattggactgggagtaactacgttggaattacaagtaggacaacaaagatgactattaaagaaagcctcctgagtgctggaagcacagcaggcgtgggtctgtccactcactgtaatgtgatttgcacaggaaaacatcacatagggcacatcaactcaggaaagatagtcgttgaaaagctacctcagctgggcgtagtggtcacgcctgtaatcccagaactttgtaaggctgtgaggcttgtggatcccttgagaccaagagtacgagaccaacctgagcaaaacagggagaccccgcctatgcaaaaaatacaaaaattagccaggcgtggtggtgcactcctgttgactcagctattcaggaagctgaggcagaaggaccacaagaagtcaaggccgcagtggggtataatcacatcactgcactccaccatgggtgacagaggtgagaccctgttgcaaaaaaaaaaaaaaaaaaagcaaaagaaaagctgcctccatttagcaataatttcaaacatgatgtttgggtacaaaattggtgtacttaatggatatttctgatattcttaactaaatttgaagctgtgagggaagacaaactcagggtccacagggtgggaaaagtccacaagatcaccctcaagtgccgtcattctctaggaccccgagagccctagcggttgttacgcttgcagttatgatttattacagtgcaaggctacagattaaaatcaaccaaggcaagagatgtatggggcctcttgggggccaaggtgggcggatcacttgaggtgatctggacggttccagacacagggctttcctttgtctcctccctgtggagttgaagacagcgctgatgttcccggtgacgttgacacagagcactgccaaccagagaagcctccgtgtccagaggtttttttttttttttggagatgcagtctcactctgtcactcaggctggagtgcagtggcactatcttggctcactgtaacctctgcctcctgggttgaagtgattcttctgcctcagcctcctgagcaactgggattacaggctcgcgccaccacgcctggctaatttttgtattttttagtagagatggggtttcaccatgttggccaggctggtctcgaactcccgaccttaagtgatccgcccgcctcagcctcccgaagtgttgggattacaggcatgagccaccgtacccaccctgtgtccagcatttttactgggacttggtcacaaagacacagctggctacccacgtggctgacctccatctccagcccctctgcaggtgagcagaaactacatagcccaaagccccaacctaggactggtcccagaccccacgtaaacaaagacagccattaggtgtgacattctaaggactcagagatcacctcccaggagccccaggcaaaagccagacctcatttggggcgaagttacattcttttttattattattattatttgcccatcattgtctagaagttacattctgtatgacacatctgtcagatccctggaagcttcctcgccaccgactgcatggcaggtggtgctcatgtcactcggcccttccttggccccacacagctgcaccaggctgagaagagcttgaatggaataaagtcagacacagctaacagctcacttttttgtctccaactttgaattgctcctttccaagaaaagaaaaaaaacttctttttgtttaattggatttttttttttatttattttttgaggcagagtctcactctgtcacccaggctggagtgccatggcacaatctcggctccctgcaacctccaccttccaggttgaagtgattctcctgcctcagcctcccaagtagctgggattacaggtgcacaccaccatcatgcctggccggaatttttgttttttagttggctctccagaaccctctaagtagttcagctctgcaattgagttaaatgtgaagcctgaaaagagactggcatctgtgtagacctgagttctaacaattcaaagagtgaacacgggacgttgtcctctggattcggtgtcaggagcctgcctcgccgagctggagagtgtgcccatgactgcaggtgggagccacatggtccgtctaggtggcgacacctgaggacagaagtggtttagctgggcacccgctgctgtgttggggccagacccttttggagaggcagggacgcccttcctgtcaggtggaatcttttcaaatattgcttttgatcgttggagatacttgcagccccctagttcgtgttttattctggcagaattgtgtttgacgtgacctctgtgttgacctcatcatacgtgtacagttgtcttgcctgggaatcttatactctgttcttctgcactcagattcacagccatgaggccgctcctcccaaggccctggagtgtggcactgccagctgtcacagccacggtcctttacattgtatacacagagtgcagtgacatgcccctcctgctcaggggccacagtaggaacaggctggagtgttctgtggtaccatgccggcagtgctggcttctgctgtccaggggcttgtggtggctccagtgggaagggccacgtaagcagaacaggaagtgtgagcagtgtccactgggaggagagggacaagtgtcccaggcagagaggacacagtgcatgcagaggctggagggaggctaggggcttgagtggggctgcgccagcaccaggggcctcacaggggccctgggccacacacctgcccttagccaagggcgtttctccttggtggtttgaaatctcaaaccacattgaggaacctgccagaaatcgaaaccagaattaagaaattaagttacatgtaggagattttactttaaaatcagaacatgcagaaacgttctctgtggcttcgggtcaggttcgggcttgtggggctgtacactgccagttgataccttcttccctgggttctgtgtttttttttttttttttgagacagagtcttgctctgtagcccaggctggagtgcagtggcacagtcttggctcactgcaacctctgcctccctccctgggttctttatagcagtcagcagctggtggctgaggcatttggggcactgtgtccaagtgtcaaggccgcatgtgtgtcagggggcacacccttggtgtgcttggtaagggctcagagaagggcatctgctggtccatgtgggctcagccagcagcctgctaaagaccaccccgccagccaccagcctgcctgcgacagtgatagggcagagatgctgctacaataaagaccatgcgggccaggcgcaggcgctcacatctgtaatcccagcactttgggaggccaagccgggctgatcacttgagctcagaagtttgagaacagcttggccaacgtggcaaaaaccccgtctctattaaaatacaaaaattagccaggcatggtggcactcgcctgtaatcccagctacttgggaggctgaggcaggagaatcgcttgaacccaggaggaggtttcggtgagccaagattgcaccactgcactccagcctgggtgacagtgagactacgtctcaaaaaaaaagactgtgctagacggtggtgttgaacttgaacttgatgcttgtgctgaggtcaggagacacgtgcacagcttcagggctagaggggcacaatggctgcagactatgctcgggcagctcggaaagacggtgacgggtccaggctgccgcagctaagcctcacaagagctctggccccaccaggcgggccctctgggttccattcccactccccactgcctggaggcagcagccctgtggttactgtaggagggacctgaatgcagtgaagatctgcactccacacctgtctctgtgcctcagtctccacgtctgcagcacaggggcctgactgaaataacgtggccaggcacacagcccagacgccagcactgtgtgcactgtgggaggggacgatggtccctagcccagggcctgagctgctgccttgccaattcgtggtgacagctttggcctgggtctggcaggggctggctgctactgctgaaggcctgtctgcactgtttccctgcctttccacaagcactgtccctcctggctcttcagagttgagtggttataccttgtgcaagaaaaacaatgaaacagattgtctgaatgtttcagacctgcctgaaacattctgcaggagaggtcatcccaaggcttgaaagtgtttgtcacactccttcaagcccccagggcagggcccctgagggaagggtgcaggtggagggtgggcaggagtgggagccattccttggggacaggggggctcctcagggctgtctggcccttggcctgtggttccaggtctatggtctgcttggcacatagcctggaccctggtgctgtgcaggcactggctggatgagggcaccgagcagatgagccccaggcatgcccacttatgggcataggctgggtgcagggcactgggtccaacataaccatggcagagggctcagggggcctaaaagtcatggatggagttgcccacgcagcctgcggtcaggttccctgtggagccgtgctggggttctgcgcctgccccaggatttgctggaagaagctccccctcctctgtttgtgagtcgggccctacccccaagtctccccctcagtgatagagacctttacataacacaaataaacaaggcaactggtttagaagaatgagtctgaaaactagaatggcgtgtttaaggaaagcttaggacaggacaattagagacagaggtgcaggtgtgtggagttggcagcaggaggcctgggggagccgctcgtgcctttccctcctgccctggcctcccttggaactcggagcagccccctgccttgaggaggcccttcctttcagtgagcctgtgccgcagtcgtccgagggaacacagtggggacatatttccttttttttttttttttttgagacagagtctcactctgtcgccaggctggagtgcagtagcctgatctcagctcactgcaaattctgcctcctgggttcaagcaattctcctgtttcagcctcccgagtagctgggactacaggcatgcaccaccacgcccagctaatttttgtatttttagtagagatggggtttaaccacgttggctaggatggtctcgatctcttgacctcatgatccgccagcctcggcctcccaaagtgctgggattacaggagtgagccaccatgtccggccggaaatgtttattaaaatagcagatgaggccgggtgctgtgactcaggcctgtaatcccagcactttgggaggctgaggcgggtggatcacgaggtcaggagttcaagaccagcctgaccaagatggtgaaacccatctctactaaaagtacaaaaattagccgagcgtagtgagacttgcctataatcccagttacgagggaggctgaggcaggagaatcgcttgaacccaggaggcagaggttgcagtgagccgagattgtgccactgcactccagcctgggcaacagagcgagactccgtctcaaaaataaataaataaaaatagatgatcatagacaggagggatgaagtagaagattcaaagcagcttaaaaaaaggaagtaaaaaagaaataaggtcaggagacaagattgagtgactgtgaaacatcaacaataggcagatttaaaataaagtcaggaaatagctagatcaaagaatagaaaggtgaaccaggtgtgatatccacctgtagtcccagcttcttgggaggccaacgcgggaaaatcacgtgagcccaggagttggaggcaccgctgcactcaagcctgggtgacacagtgagaccctgtctcaaaaagcagcaggaagagaggctggcatgtggggctccagggggtgtgaaggagggtccacaccctccttcctccacctggccatactgagcagcacattctctgagccaacggcccctacaaacacccaccctttcctcctggtagcccagagggcgcccctgcctgctcacttcccaatgtcgggatcctgtgatttctgcctcttcagaaaggacttgaggcattttctgactcagagccactcaggattccaggacctcctgtggtgacaacagggacaccagtagtgatgaattcagaaaagagcgaacgcccctcaagctgccctcccccagccctgcagacagtggccatgggcctccctgcactcaggaccgactgcacctgcctgcggcgtaggggagctggggctggcctttccttttcatcttcccctggcactgggaaatgctctgggtggtgccatgtataacaccctttgtcacagtgctctcatttcgtcgtgtaaaaggccagtccccgcctcgcagtgttggggcagccagcacaggcacgtgagacaggagccacacctgggttctcatctggcatctgcctcttgccatgctcaggttcttgcctccagatatagggcatcaaactaagtggtttccaaacttgggttcttggtggggagtgagatcagggtttcttaaaaactgcacttggaggctgggcacggtggctcacgcctgtaattccagcactttgggaggccgaggcgggcggatcacctgaggtcaggagttacaaaaaacggaacctaggctcatgcctataatcccagcacttcgggaggccaaggctggcgaatcgctggaatttaagagttccagaccagcctggccaacgtggcaaaaccctgtttctactcaaaatacgtaagttagccgggcatggtggtgggtgcctgtaatcccagctactcgggaggcggaggtttcagtaagccaagattgcaccactgcactccagcctgggtgacagagtgagactccgtctcaaaaaaaaaaaaaaaaagaaagaaattcaaatctcagtgtcgataaatgaagttttgttggaatgcagccaaagcccaccgatttctgcgttgtctgtggttcccttcatggaacagtggcagaactgagcagttgcaacagaggcaggcccagcaagcctcaaatatttacactgagctgagcgcagtgactcacacctgtaattccagtgctttgggaggctgatgtgggaggatcccttgagcccaggagtttgagaccagcctgggcaacctagtgagaccccatctctacaaaatattttttaaattagccaggtgttgtggcgtgtgcctgtagtcctagctacttgggaggctgaagcagtaggatctcatgagcccaggagttggaggcttcagtgagctaggatggcaccactgcactctagcctgggcaacagaacaagatcgtgtctgtaaaaagagagaaaagaaacagacaattcctagactgcagcaggtgtttgcagtagtgcatccagcaaaggactccccagggaaggaaatgggccaaagatgggaacaagcgctgcttggaagagcctgtgaaacagtgcttggcttctctgcacaacaaggaaacgtgtttagggccacattgtagaatggctacaaggacaagcaccactcacgctggctcagtatctcccaagtagagcatttccccaccctgtgacctagagtatcttctcccagataaattcctaggagaactgcaaactaaacacttgttcctgagtgtccacagacacttgcttcctggtgtccaaccctgagcacagcccagatgcccggcagcgggaactgggcatggctggtgtgtgcccacctcgggacctgctgctgcactcggcaacagggacagcaaggaggcaggaggccaggccaggtttgggggctcccctgtgtgtttctgcatcatcaacttgaagaagcagccaacctcggcccaggatcatccctgggggaaggactgacaggagcgcatctttagcctcatgcttaagatctgtgcattgggccaggtgcggtggctcagcctgtgatcccagcacttttgggaggccaaggtgggtggatcaggaggtcaggagttcgagaccagcctgaccaacatggtgaaacccgtctctactaacaatacaaaaattagctaggtgtggtggtgcacctgtaatgccagctacttggaggctgaggcaggagaatcgcttgaaccctggaggcagaggttgcagtgagccgagatcacgccactgcatgatgtgtgcattggtgttaagtcagctattaagaggtgtgggctgggtgtgtgtgggggtcagaggaggtgatgtttgccctgagatgaggtcagagcccacattcccatgggggtggactcccctttgtaggccttgacacgagcatgggagcggagctaggggcactgacatcaaaggtggtggcgcctatccagaggactccgggtttcattccaagtgcggggaggctgcagcatgtccctctttaatatagaggtgagggaggctctcagcaccctgcctgttgcagggaagcctgaggacaggacctccagggaactctgcaccagagcggaatcctcagaccggcaactgggtggtcttgattcatccagaacgtaattctcctagaggtctgggaaggggtgctcttgtaccttggttttgtgttttgtttttgtttgttttttgagacagagtctcactctgtcgcccaggctagaatgcagtggtgcgatctcggctcactgcaacctctgccacccaggttcaggtgattctcctgcctcagcctcccgagtagctgggattgcaggtgcctgtcaccacgcctggctcatttttgtatttttagtagagacggggtatcactatcttggccaggctggtcttgaactccggacttcgtgatccacccacctcagcctcccaaagttctggggttacaggcgtgagccactgcgcccagccgcaccttgttttttttttgctgcctgtagctgtttctcattagcctgatggaggtggctgttggggtggtggggtgcttattataaagccttctgctgtcacagccctggggtctcacttcctgggctctctgcatagggagccgccctccagggcaagggccacagtgtgcagtaagccccccatggccacagggcagggcgtttcaagccaagagtctgcactgtttgctggccactaagggcattgaatggatcacaaaactggcttttttttcccccagtcaaatagaaatggggttttgccatgttgtccaggctggtctcaaactcctgggctcaagcaatcctcccacgttggcctcccaaagtgctgggattacaggcacgagccaccatatctttaaaaatgtaatagaatggaaaatggcaaagcgcgctgcttttcatagaagagactatcgcattggggttcttctgttgcccctgcctgtgctgcacgtcctgcttcacagtgtaaagcgcaactcttgctgtgccttattgtaacaggtatagggtggatgctgccatcatgaagagagaggagagctctttgcttataaaattccgtagagtggagaacaggatgtgccggcttaggagagggaagaggtacaggcccgctctgcccgagctgcagatgggacacacatttcccgactcagaggggagtcgtgtctttctccagggtcaccgagcagcaagcgcatccactgtgtgttcttattttctgagcctgtggactgggtttaccaacagttgcctgtggcagagccggccaccagcccgctcataggaaaaaggaagcctgtgcctccagggagggcccacgatgggaatgcagtctgagaagggtatgtgctcccatgctggaccggctggtcccacacccaggaccaaaaacacctcctggcaggagatggggagatgtacttcatgaacacacgttggggaaggacactcctggaaggcagaggctcaaggcgggctgtgtccaggccaggagattcactcccacctcaatttcctcctcagcacggctggcctggcactggtgcctgcttcagagtttagtgtgtgtaaagtgtggctggcccagcaagcaggggatgatggcggttgtcaaggccaggggaggtgcagggacaggattctggctcccgtgtgtaacgtctgcatctcaggaggctctcatgttagaagctgggtcaggggcttcgtgatgcacacaaacaccaaacaagcaggaggccttccgggatcctgctcacgagcagcttcctggaggcaagcctggcccgtctgccccttggtgacatcaggaccccagcaacagaaccagggaagccaccatgttgtcgctgccattttccagcgtggtaaacagaagcaagacaaggcgcactcaggacacccaaacagacggcggggccagccagtggcatgggcgggctgccctgccctctggaattttctgggaaagaacataaggaaagaagcggtgctgatgaggcagctggagttatcaggacccaagctcagctcctccttcccatcaggccccgttggccacttttaggcttcgtccgcctggtggctccctgcttggggccgttccctggctaggcccttcctctgggccaaagcagagaggagagcgcgtttgccatgcgttctcattttcccagcctgcgggctgggttctgtcagagcaaggtcagctctcagagcttctgtccccacccaccctgtcctgctgagccaggctcaggtatgggtaagagctgggagcgctgtgcacgaggcctggcagcatctcatcactgccgctgtaccgagtgcacaagggcgcttcctgtggtgttcagggggttagatcagtccccagtgaggacagagcagagatccagatgcatcccaggccggctgcagtggcttctgcctctaatcccagcacttcgggaggccaaggcaggcagatcacgaggtcaagagatcgagaccatcctgaccaacatggtgaaaccctgtctctactaaaaatacaaaaattagccgggtgtggtggctggcatctgtaatcccagctactcgggaggctgaggcaggagaattgcttgagcccaggaggcagaggttgcagtgagccgagatcattccattgcgctccagtctggcgacagaacaagactctgtctcaaaaaaaacaaaaaacaaaaaaatgtatcacaggcctgtttgtgtggttgtctctgggaaatgttccagaagctacaagaaagcacatgtgcaggccaggcatggtggctcacacctgtaatcccagcactttgggatgctgaggcgggctgatcacctgaggtcgggagtttgagaccagtctgaccaacatggagaaaccctgtctctactaaaaatacaaaattagcctggcatggtggtgcacgactgtaaaaaatcccagtgactccaaaggctgaggcaggagaatctcctgaacctgggaggtggaggttgcagtgagccgagatcgcaccattgcactccagcctgggcagcaagagcgaaactccgtctcaaaaaaaaaaaaagcgcatgtgcaagaaatagctcctgagctgagttggaatttctcatccttaaacaatgtgggaacctgctgaggtggggtgggggctcccgggtgggcggactcgggggtgatagccgccggttctgccttgcagcagcagtggacgtcagctcagcgaggtcttcatccagctgccctcgcgaaaggagctgcccgagtactacgagctcatccgcaagcccgtggacttcaagaagataaaggtaaccctgacgttgtacctgcgccccgcatgtgcccggaggggagtctgacccaggggcacccccatctgagagctgtggtgtgtgggcagaatgaccagaaaccacctaggcggtgccttgggctacctggttagggacctggtcgtgggcttttggggttccttgtaagggttgggggtgtcctgagggatgtcagtgggcagtcggtgttgggtgttccttcaaggtcccactcacttagtgctgggcctcagtcatgcagttcccatgcctagtgagccaggttaccgaggctggcgcttcggccacatcctcataggcacgaggaatcctagcccgtggggtctccagcacacagccaggcctgcgggcaggcgaggcggggtcctgaggtaagacctgctcctcccgtccactgcaggagcgcattcgcaaccacaagtaccgcagcctcaacgacctagagaaggacgtcatgctcctgtgccagaacgcacagaccttcaacctggagggctccctggtgagggcaccgctgggggttggggatgggccactcccacagctgggctttgacccaacccgcccctccttcccttctgaattgatgggttaaaaacaagtcccgctagctgtggtggttcgtgcctgtaatcccagcactttgggaggccaaggcgggaggatcacttgagaccaggagttcacgaccagcctgggcaacataacaagaccctgtctttaaaaaaaaaaaagaaaaaattaaaaatttccaacttgggatattttagcaattacaaaagcagtatgtatttaccgaagaaaataaagataggcacaacagaagaaatagactcagagtcctctgtctgttggaattttattttaaattccctggggcacattctcttcaaaggaatcctgtgggtttgttctttcctgtgatagaattgacacatacacagcctcaacttggcaaactttcttaagtgtctttgggattgattcctctcagaaaaaagacttgactttgatgagtttgggaaagatgctggcttcaacaaggggcatgtatttccaatgttattgcagacctcagagattgtgcagaaggagggaggcacctgcagctattcccaaaccagtgtgcctgacctttcaccctggagcatttcagaagtctgatgctcgggcccctatggaggaagattatggagagggccttccaccctgggtgggctgaagccccgacccgctgaggctcgcattggccactgatcagctgtccaggggcaacacagggctggggctggggctggggccagggccgggcaggcagccctccagtcgggcccatccactcaagcccctggtgtctctgcccagatctatgaagactccatcgtcttgcagtcggtcttcaccagcgtgcggcagaaaatcgagaaggaggatgacagtgaaggcgaggagagtgaggaggaggaagagggcgaggaggaaggctccgaatccgaatgtgagtcccgggggggttcaggacgccggggttcacgctggcccgagagcccccaaggccccagcttttcacagccctcccggctcccagacgccccttgctgtgggggtgctgcattcccagagctcaaggctgtctttccctcccggtcccctccagctcggtccgtcaaagtgaagatcaagcttggccggaaggagaaggcacaggaccggctgaagggcggccggcggcggccgagccgagggtcccgagccaagccggtcgtgagtgacgatgacagtgaggaggaacaagaggaggtgaggccgggcccccgagcaggcagagctggcatgtggcaggaggcatcccggggccctgatgggacagccctgtggggcggtgctcccacgcccccacgctgcaggtgggaaagctgaggcttgacctgccatggctgaccccaggtcacacagccagtatgtggcagggctgccactcaaagccaagcctgtgtgaccccggaaccagctctcagtacccgtgggtgtctggggactgggggacacgtgagtcctcaggacaggcagcaggcggtcccagggcaccagggctcctgggctgaggccgggcaggccagggcttgattagggttgggtaggaggtgctaggattggggacccaccagacagtgccccgtctcctcagtggcatagagaatgggcagaaacgccaagaccacagtggatagtttttggggtgcagtggggagccggagaagatccacttgctggctttaaataatctcacctctgtctctggcccttcctggctgtgggacctggcaggtcactttgcttctcaagcttcagtttcctcttatgcaaagcaaggaggctgcatggattagggggctgcccccaccgaagggcctggctcccgctgaagcccagcgaatgccattttgtcatcacagaagcagcaaatttcagtgcctgggaattagtctgacgaaagacgcacgtgacgtttgaggacattcatgaagtcctcatgtggaggggaggcccctgtgtcaggcaggagggtctgggctgtgatgctgtctctcttgcctaatccagagcagggtgttttatggcccatgccaggctgtttaaaaaggttttatgaggccaggtccagtggctcacacctgtaatcccagcactttgggaaactgaggcaggaggctcacttgagcctgggaggtcgaggctgcagtgagccgtgatagcaccactgcactccagcctgggcaacagagcaagaccctgtctttaaaaaaaaaaaaaaaaatatatatatatatatatatatatatatatatatatatgaaagagcaaagatctttcacagtcaggaagaaccaagatggtttggaagctgtaggtcaggggccaagggccaggcaggtgacatgggacagagcagggaaggcacgtggagcctcgaaggtcccgagagggccgagtgtggtcacagggactcgtcctgtagagaaacatgaagtttgggcatggccatggcgccatctcggctcactgcaagctccaccccccgggatcgcgccattctcctgcctcagcctcccaagtagctgggactacaggcgcccgccaccacgcccggctaattttttgtattttttagtagagacggggtttcaccgtgttagccaggatggtctcgatctcctgacctcgtgatccgcccgccttggccttccaaagtgctgggattacgggcgtgagccaccgtgcccggcccacatcagtgttttcttgagcaagtttatttaaagtttggcaggtccctggcaaggtgccctggcaggggtggccaacgcacactctctcctcctgtcccctctccaggaccgctcaggaagtggcagcgaagaagactgagccccgacattccagtctcgaccccgagcccctcgttccagagctgagatggcataggccttagcagtaacgggtagcagcagatgtagtttcagacttggagtaaaactgtataaacaaaagaatcttccatatttatacagcagagaagctgtaggactgtttgtgactggccctgtcctggcatcagtagcatctgtaacagcattaactgtcttaaagagagagagagagaattccgaattggggaacacacgatacctgtttttcttttccgttgctggcagtactgttgcgccgcagtttggagtcactgtagttaagtgtggatgcatgtgcgtcaccgtccactcctcctactgtattttattggacaggtcagactcgccgggggcccggcgagggtatgtcagtgtcactggatgtcaaacagtaataaattaaaccaacaacaaaacgcacagccttgcctgcaggtggacttgtgcctggctcccaccgtttctgccagcaggagtggcgggggccacctcatgtccaggtccctgtccttctcctggcaccagaacccatggggcccgtttcacagaggaggatactgaggccccggcaggggaagaggacttgtctggtcacgcgtgtggcctttgccactgcaggtctccagcatttgttcagctgagacctacagtgcagggagcaggcagctccatccgttccctgcccgtggcccagcctgggttggggagaccatcacagaaatgggcagatgccacatagagctctcagggccatgatgcaggaagctcagggcataatgggagcccaggtggtcagtgagggaagggacggagccgcctgctccctttcaaatccagaacataatttgagtttttgtttttttgttttgttttgttttgtttttgagacgaagtctctgtcacccaggctggagtgcagtggcatgatctcggctcaccgcaacctcagcctcctgggttccagtgattctgctgcctcagcctcctgagtagctgggattacaggggtgcgccaccatgcccagctaatttttgtatttttagtagagatgggtttcatcatgttagccaggctggtctcaaactcctgacctcaggtgatccacctgcctcggcctcccaaagtgcaaggattacaggcatgagccactgtgcccagcccctaatttgtgtatttttagtagaggcagggtgtcaccatgttggccaggctggtctcaaacccatgacctcaagtgatccacccaccttggcctcccaaagtgctggtattacaggcatgagccaccgtgctttgagtttttttacagtaagtcttggccggagtgcagtggctcaatcttggctcattgcaacctatgcttcctgggctcaagcaatcctcccacctcagcctcctgagtagctgggattataggtgcacgccaccatgcccaggtaatttttgtttttgtttttgtttttggtggagacagggttttgtaatgttgcccaggctggtgtcaaactcctgggttcaagcagtccacccgcctcagcctttcaaagtgctgagattacagacgtgagccactgtgcctaaccaatttgaattcttatcatttttgtctgttcattaagagccattattagtgggtcactgtcgtcatacttggctttaattcttgagatgtggtttcttctagctctttgaacctttttttttgttttgtttttaattgagacaaggtcttgctgtgtcacccaagctagagtgcagtggtgtcatcacagttcacaacagccttgacctcctgggctcaagtgatcctcctgcctcagccccctgagtagctgggaccacaggtgcacaccagcacacttggctaattattattattattattttttttgtagagataatgtttcgctttgttgcccaggctggtggtctgaactcctgagctcaagtgatcctcctgcctcagccgctctattttttttttttaatcgagacatggtattgctctgttgcccaggctggagtgcagtggtgggatggtagctcaacttccagagctcagatgatcctccctcttcagcctccagtgtatctgggaccacagacatgcaccacccagcccagcttgaacctgtttttagtagctgctttgaagccttttggtccaacatccggatccattcctccacagaaaggttctgttgactcctttttgtcctcagcgtaggtcacactttcctgtttcttcacatgtctggcaagcttttgttgtcagaaagtagacattgtatttttatttatttgtttttaattttgttatgtttttgagatggagtctctcactgtcgcccaggctggagtgcagtggtgcgatctcggctgactgcagcctccgcctcctgggttcaagcgattcccctgcctcagcctctggagtagctgggattacaggcacccgccaccacgcccggctaatttttgtattttgtatttttagtaaagacggggttttaccatgttggccaggctggtctcgatctcctgacctcaggtgatctgcccaccttggcctcccaaagtgctgggattaaaggcgcgagccaccgcgcctggccttgttttgttcttaattgttgtttttcttttctttctttcatgtttcccctcggagacaaggtcttgcgctgtcactgatgctggactgcagtggtgcagtttcagctcactacagcctcccgggctcaagccatcctcccacctcagcctcccgagtagccggaactacaggcttgtgccaccacacccagctaattttttttttttttttttttttttggtagagacagggtttctccatgttgcccacggtggtcttgaacacctgggctcaagtgatctgcccgcctctgcctcccaaaatgctgggattacaggtgtgagccaccgcgcctggcccaattctcatttttatttagaaggagtcacccctgggtcagccaagctgagacatcagttggtggttggtcagaacttgtgcccaaatatgctgagtcagcggctctgcccgggcccaaatgctgagtcagcacctctgcccgggcagtctgcaggctggccctacctttgctttctgcctgtggttcctatcagggcacgcacttcagttctgttgggcagggagacgtgcatcagactctctccagggcatatgtgctgtcttgcgcttgcgcgtggcctcccaaacccctagggatacctggggccagctggggcagtctctgtctcgacctccttttccatttctggctagtttaccaatctgtttcatccttaggccagctgatgaccttggccctctcctcccgagatccctgcagcttccaacagtgaggccctccagcagtgaggctgctgattttcatggcctggctggagctgggggcccaggccaggagcagccccaggcaaaaatcacctcccgctgctcttccctgccactcagtactttttctggaataaacatttcctcactgggtgaacacctttgacgagatcttcacagtcctgggatggttgctttggacaattctgtttagctttattgttgcttttagggagaggatttgccaagatcttcactccaccatttgggaaaatccacatttcgtttgttgcaatagctttggctttattttaatagattataatttatttattttttatttatttatttttgagacagggtcttgctctgtcacccaggctggagtatagtgacatgatctctgctcactgcaacctccgcctcctgggctcaagcaattctgccacctcagccttttgagtagctgggattacaggcgtgcaccaccatatctggctaatttttttgtatttttagtagagacaggattttgccacgttgcccaggctggtctcaaacccctgggctcaagcagtctgtccacgttggcctcccacagtgctgggattacagatgtgagccaccactcccagccagaatttattttaacgtttatggaaaaccaactcaccaaacctatgatttcatggttttcagaatgaggccaatttaaaaataagtgccttagtctgggggtgttggcccatatccataatcccagcactttgggaggctgaggcaggaagattgtgaagattgcttgaggccaggaatttgagaccatcctagacgacatagagaccccccatctcaacaacaaaaataaaaaaattagccaggcacagtggtacacatctgtagtcctagctacttgggaggctgaggcaggaggatcacttgagcccaggagttcgaggctgcagtgagctgtgatcccaccagcgcactccagcctaggagacagaggaagaccctgtctcaaaaaaaaattttttaaggaaaattttttaagaaaaaaaatgaggggagcctacagaaataactttgagtgtccacctgtgcaaaacccatgtcatggggacacagggacatgttagctgtggtgcagatgagtggtccgggctgcaggcctgtctgactcaggtctcagacatcggctttggcctgagggcctggaaccagcttggtccccatatggcagtggccccaagccaggggccttcacctgtgtgacctggtgacagctgctggctggctgctgcccttcctgacctttgctctccacacctgcccctctcgcaggcctttcctctgtctttcagtcccgctggccagtgcccttctcccaacaaccccaagggctgggggacttcattcctgtttcccagatgacacaagtggagctcggggaggttgagccagtggcctaaggctacacagatctgagcttgggtttgggggacatgagactcctcaggggctgccacctgctctggggtctggagcaaggaccctgagacttgaaagttgaaatggcgcctggaaccaggtggtggactaagcaatggcgggcaggtcggtgtgtccccaggagtcaggagaggctgccacaagacaggagtgagcaggaccttaaagctgaaacgccggatggtcagggcatgatgggacctgacacggcctggactaggagggggtgggaagaataatacgggacatcatatgtggcagggggtcatgcgctttcccatccagccatctaggctggctctcctagattctttttgttttgttttgagacagagtctcgccctgttgcgcagctggagtacagtggcaccatagcctctcgagtagctgggacgacaggcgcgcacccacacccagctaatttttgtattttcagtagagacgtggttttgccatgttggccaggctggtgtcaaactcctgacctcaggtgatccgcctgccccatcctcccaaagtgctgggattacaggcatgagccaccaggcccggcctctcctagagtcttgcttccatcaagtcatggagtctccttttccttccctggagtttgagtgtacttgggactcactggtaaccaacagagttcaatggaagtgacatcatgtaactactaagagtaggtcacagaaagcacagcttccgccttgcttgctcgctcactcttgaatcaccagctgccatgtaacagcctgacttcctggagcctgccattttgtgaggaggcccaaccaagcccatgctataaggccaccaagaccacgggaagagaaagcaatggctgccccagccctagccctcagctgtcaccagctgcatcagagaccctgagcccgtaccgccgagctgagcccttcccacattcctgacccttagaaaccacaagagctaataaacacattgttttaagccactaagctgttaggcagcaacagtactggaacatcataaaataattttttaaatgacagggatctaattaaacgtggaaggatcttgagaacattgttgaggatagaacagcaggctgcacagtgaagcaaatgtccagcaagatggacacacactggatcctggatatgtgttctggaccatgtcactagtacatcacatttagagaaagctgtgtcaggacccaccccaaacacaaaacagcctgaactgctgctgttacccttggcagtgggggagggaagggtggcgttaagagattccccaagatggtgaggtcacctggccattttattttttatttttattttttatttttgtatatatatatatatatatatatatatatatatatatatatattttgagacagagttttgctcttttgcccaggctggaatgaagtgacgcaatctcagctcactgcaacttttccccccaggatcaagtgattctcctgcctcagcctcccaagtagttgggattataggcacccgccaccacgcccagctaatttttgtatttttagtagaggcggggctttgccatgttggccaggctggtctcaaactcctgacctcgtgccacccacctcggcttcccaaagtgctgggattacagacatgagccactgcacccggctgcctggccattttaagagccactttttgggccgggtgtggtggctcatgcctgtaatcctagcactttgggaggccgagttgggcagatccctttttttttttttttttttttttgaggtggagtcttgctcagtggcccagccatgagcgcagtggtgcaatcttggctcactgcaacctctgcctcgggttcaagcgattttcctgcctcagcctcccatgtagctgggattacaggcacgtgccaccatgcccagctaattttttgtatttttaatagagacagggttttgccatgttggccaggctggtcttgaactcctgatctcaagtggtctgcctgcctcagcctcccaaagtactggcccagtttctgtatgtttgaatagagacaaggtgtcactatcttgcccaggctgatctcgaactcctgagctcaagggatcctcccactgcagtctcccaaattgctgggattatagggtgtgagccattgcgcccagccagaacctcttcttgattcctcaccaatgttttggtcaacagcacacttggattctagtttctgtcatggtctcaaagatttctactgaaataagaccgttcttggtcgtgccttgtggctcaagcctgtaatttgagcactttgggaggccaaggtgggcggatcacttgaggcaaggagtttgagaccagcctggccaacatggtgaaaccccatctctactaaaaatacaaaaattagcggggcatggtggtgcatgcctgtaatcccagcaactcaggaggcagaggcaggagaatcgcttgaacccgggaggcggaggttgcaataagccaaggtcatgccactgcactccagcctgcccaacacagcaagactatgactcaaaaaaaaaaaaaaaaaaattcttacctgctggagcgttaatatgaatgaggtgtccagagcccagctcctcctgatccacccatgtctgattctgcttctgtgtccccacctcacaagtggccactggcctacaaggagtccatgtcagctgccatccctttccatcaggccacaccagccgatcccccctcacccactcattctccttcctaaatatcccctcaacccacccacctctctctccacccttgaccttcacctgcaccagcctcagcctatagctggcctagaccagcatggtcaactccttggtttctccgcttccacccacgctgcgctccatgtggccagagggttctaaactcttgcagttcctcaatgcacaagggggcctggtcagctgagcctggcacctgcccagccttctctaagcctcagctaaaattctataccacatacttctagacactggcatgcgcaggggcctgttgttgcaacccctcatgtggtgaatctccctcagagccctcagacatcagttcccgccccttcttgccttctttggtaatctggggcaggaagcacttggggcgggtcattgtggctcacgcgtataatcctagcactttgggatgctgaggtaggaggatcgcttgagcccagacgttcaagagcagcctaggctctacaaaaaagtcctacaaagctcagttttcaaagcatatttctggccgggtgtggtggtgcacgcctgtagcagccagctacttgggaggctgaggcaggagaattgcttgaacccggaatgcagagagtttgcagtgagcccagattgcaccactggactccaacctgggcgacagagcgagactctgtctcaaaaaaagaaaaaaagaaaacagaaaaggaaatgctagtgtgtatgctgaataaataagcactttgagaagttgacagggaggctaggcatggtagttcacacctgtaatcccagcacactgggaggctgaggcaggaggagcacttgagcccaggagtctgacatcagcctggacaatatagtgagacaccgtgtctacaaaaaaaaaaaaaaaaaattatccaggcatggtggtgtccgcctgtagtcccagctactcaggaggctgaggtgagaagataacttaggttgaggggggcaaggctgcagtgagctgtaatcccaccactgcactccagcctgagtgacagaggaagactttgtctctacaaaaggaaaaaagagaaattgacagaagagaagttcctcctacttctattttttttttttttttgagatgaagtctcactctcgtccaggctagagtgcagtggctggatctaagttcactgcaacctccccctaccatattcaagagattctcctgcctcagcctcctgagtagctgggattacaggcacccgccaccacacctggcttttttttttttttaaatagagacgggattttgccatgttgatcaggctggtcttgaactcctgacctcagatgatctgcccaccttggcaacccaaagtgctgggattacaggcatgagccactgcgcccggcctcttatttctttagaggccccaaaaaagaactgcaaagaagaaacacgagtgcattagaaaaactgttcaggctgggcacagtggctcacacctataatcagtttcagaggccatggcgggaggatcgcttcaggtcaggagtttgagacccccttggggaacatagtgagagtcctgtctttatttatttattatttatttatttatttatttatttattttcttgagacggagtctcactctgtcacccgggctggagttcagtggtgcaatctcaactcactgcaagctccacctgccgggttcacgccattctcctgcctcagcctcctgaatagctgggattacaggcgcccaccaccacgcctggctaatttttttgtgatttttgtagagacggggtttcaccgtgttagccaggatggtctcgatctcctgatctcatgatccgcccgtctcagcctcccaaagttctgtgattacaggcgtgagccactgcgcccagcctcctgtctttatttttaaaagaagggcgcagtggttcaagcctgtaatcccagcactttgggaggccggggcgggcggatcacgaggtcaagagatcaagaccatcctggccaacatggtgaaactccgtctctactaaaaatacaaaaattagccgggcatggtggcaggctcctgtaatcccacctacttgggaggctgaggcaggagaattgcttgaacctgggaggcagaggttgcagtgagccaagattgcgcctctgcactccagcctggggacagagcaagactccatctcagaaaaaaaaaaaaaaagaagaagaagaagaaaggggggaaaaaaagccgggtgtggtggctcaaacctgtaatcccagcacattgggaggctgagcaagaaggattacctgagcccaggagtttgagaccagcctgagcaataaaatgagaccttacctttacaaaagaaattcacaacttaggtggtcatggtggcacacacctgtgatctcagctactcgtgaggctgaggtaggaggattgcttgaatccgggaggtgaagtctgcagtgagctgtgatcacatcactacactccagcctgggtgacagaattagactctgtctcaaaagaaaaagaaaaaaactggttataaatcctcttaataagtaaatgatagctggacatggtggtgcatgcctgtaatcccagctactcgggaggctgaggcagaagaattgcttgaacccaagaggcagaggttgcagtgagccaagattgcgccactgcactccagcctgggcgacagaacaagactctgtttcaggaaaaaaaaaaaaaaaaaaaagacgttctcctatttattagcatactgttcacaatagccaaaatatggaatcaacctaagtgcccatcaatgtttgaatgaataaagaaaatgtggtgtatatacacaatgtagtactacactgccattaaaaagactgaaattttggccaggctcagtggctcacgcctgtaatcccaacactttgggaggccaaggcaggtggatcacctgaggtcaggagttcgggaccatcctggccaacatggtgaaaccctgtctctagtaaaaatacaaaaattagccaggtgtggtggcgggcacctgtagtctcagctacttgggaggctgaggcaggagaatcgcttgaacctgggaggtggaggttgcagtgagatgagattgcgccatccagccggggcaacaagagctaaatccatctcaaaaacaaaacaaaacaacaaacaaacaaaaaaacaccagcatcactgaaatggatcataaactatgttcttttattgaacagaccagaagaaacctactttaacctttaaaaaagaaaaaggaaagccaggcgcggtggctcacatctggaatcccagcacattgagaggccaaggcaggcagatcatgaggtcaggagttcgagaatagcctggccaacagtgaaaccccgtctctactaaaaatacaaaaattaccagggtatggtggtgagcacctgtagtcccagctattcaggaggatgaggcaggagaatcccttgaacctgggaggtggaagttgtggtgagccgagatcgagagccactgcactccaacctggcaacagagcgagactccatctcaaaaaaaaaaaaagaaaagaaaaataacttgcccaaggtcacacagtaaaagacagaggtagggtttctgctcattgtgattctaaacggctgtccacaaaatcaaagttaaggtaaaatactctctcagaaggccccgtaagggcaggtggcactttttctttgaagcctgtatgtcagaattgcaatcagttacaccaacccatttaaatcagtaggattgcccgggggtggtgagtggtggctcacacctgtaatcccaacactttgggtggccgcagagggcggatcacttgaggtcaggagtttgagaccagcctggccaacgggcgaaaccccatctctactaaaaatacaaaaataggccgggcgtggtggctcacgcctgtaattccagcacttggggaggccgaggcgggcggatcacgaggtcaggagattgagaccatcctaacacggcgaaaccccgtctctactaaaaatacaaaaaattagccgggcatgtggcgggcgcaggaggctgaggcaggagaatgacgtgaactcggaaagcagagcttgcagtgagccgagactgcgccactgctctccagcctgggtgacagagtgggactccatttcaaaaacaaaaaacaaaaaactaaaaactgtgtggtggttccctctccagaaaataagtggaattaccataggacccaagcagttccccttttgggtatatcaccaaaataattgaaagcaggatggccaggcgcagtacctcacacctataattgcagcacttggggaggccgaggcaagcagatcacttgaggccaggagtagttcaagtgcagcctggccaacatggtgaaatcctgtctctactaaaaatacaaaaattagctgggagttgtggcacacacctgtagtcccagctactgaggctgaggcaggagaatcgcttgaaccccgggaggcggaggttgcagtgagtggaaatcacgcgactgaactccagcctgggcaacagaaagaaactccgtctcagaaaaaaaaaaaaaagtgggagctcaaagagattatttgcatgtccatgttcatagcagcattattcatcacagccaaaaggctgaatcaacccaagagtccgtggatggaagaacaggtaaacaaaagatggtgtatccattcaatggaacattatttggcctttaaaaggaaggaaattctcactgagcatagtggtttatgcctgtaatcccagcactttgggaggctgaggcaggggggagggggcggttcacctgaggtcaggagttcaagaccagcctggccaacatggtgaaatcccgtctctactaaaaatacaaaaaaattagccgagtgtggtggcacacacctgtaagccaggctacacgggagactgaggcaggagaatcgctggaacccgggaggcagaggctgcagagagccgagattgcgtcactgcactccagcctgggtgacagagcgagactcttgtcttaaaaaaaaaaagaaggaaggaaggaaggaaggaaggaagttctgacacaggctccaacacagatgttatgctcagtgaaataagccagacatgaaaggacaaatactgcctgatctcattcataagaggtccctagaattgtagaatggtgtgtgccacgggctgggagggggtgtggccagagtttcagtttgggaagttgagaatgttctggagatggatggcggtagtggtggttgcacaactgtgtgaatgcgcttaatgcctctgaattgtgcagttacaagtggttcggatgggccgggcgcggtggctcatgcctgtaatcccagcactttgggaggccgaggcaggtggatcatgagatcaggagatcgagaccatcctggctaacacggtgaaaccccatctctactaaaaaatacaaaaaattagccaggcatggtggtgggcacctgtagtcccagctacttgggaggcggaggcaggagaatggcgtgaacacgggaggcagaacttgcagtgagccgagatcacgccactgcactccagcctgggcgacagagtgagactccgtctaaaaaaaaaaaagtggttaagatgggccgggcatgggggatcacgcttgcaatcccaacactttgggaggctgaggtgggtgattacgaggtcaggagttcgagaccagcctgaccaccatggtgaaaccccgtctctactaaaagtacaaaattagccgggtgtcgtggcacacgtctgtaatcccagctactggggaggctgagttgggaggatcacctgagcccagggaggtccaggctgcagcaagccatgattgcaccactgcactccagcctgggtgagagagtgagaccctgtctccaaacaaacacacatgaaaaacagattttttttgccaggtgcagtggctcacacctgtaatcccagcactttgggaggccaaggcgggtggatcacgaggtcaggtgactgagagcatcctggctaacacggtgaaaccctggctctactaaaaatacaaaaatttagccgagcatggtggtgggcacctgtagtcccagctactcgggaggctgaggcaggagaatggcatgaacctgggaggcggagcttgcagtgagctgagatcacgccactgcactctagcctgggggacacagcaaaactgtctcaaaaaaaaaaaaaaaggtttttttaatttaaaaaggaaagaaaaggagagtgctcgtgtggcaggcacctagccctgtccagcgcaccctgagacagggatgatgtctcctccttgacctaagaccacaagttctaaccaattcaaccgaggacagagccccaattccaggcagggcaatggggtcgccttgtgaactaagatgcagatggagaagagcagacacagacacaggtcttggggcccctgcaggggtttctcactggctttttccccctggattcctatgggttctggggaacagagttaggtcggctggcaagacagatgcatgaggctgtggcgcccttgacattgagccggagggccagagttcgtcattgctgacgcagagaagctgggagccaaggttagccagatggtttggaggagttttaaacaatcttttcttttctttctctttccatctgtctgtccttctttcctcccttcctgccccctttcttttctcctttctttccttcctctctccttcctccctttttttctttttttttggttttctttttgtattagtattattattttttagacagggtcttgctctgttgcccaggctggagggcagtggcacgatcacagctcagtacaccctcaaccttctgggttcaagcaatcctcctgccttggcctcccaggtagctgggactacaggcgtgtgccaccacacctggttaattttttttttttttgagacggagtcttgctctgtcacccaggctgcagtgcagtggcgtgatctcggctcactgcaacctccacctcccgggttcaagcgatcctcctgcctcagcctcccgagtagctgggattacacgcgcccgccaccaagcccggctaatttttttatttttagtagagacagagtttcaccacgttggccaggctcgtctcaaactcctgacttagtgatctacccaccttggcctctcaaagtgctgggattagaggcgtgagccaccatgcgcagccaatttttgtatttttagtagagatggggtttcaccatgttggtcagtctggtctcgaactcctgacctcaagtgatccacctgcctcagcctcccaaagtgctggaattacaggcatgagccaccgcgcccagccctcttaaccatttttaagtgcacagttcagcagcattaagcacattcacattgttgtgcaaccatcagcccccgtccatctccagctttctctttttttttgtttgttttgagacagggtcttactctctcgcccagtatagagtgcagtggtgcggtcttggctcgctgcaacctctgccttccaggttcaagctattctcctgcctcagtctccccagtagctgggattacagacacacatcaccacgccctgctaattattttgcatttttagtagagatggtgtttcaccatattggccaggctgatcttgaactcctggcctcaagtggtctgctccaaactgctgagattacagccgtgagccactgctcccagccatctgcacctttctcatcttcccaaatgtaactatgtccccgtgaaacactcactccccattccacctccccagcccctggcaccccccattttattctggtgctaggggaatttcaaaccaggcaagtctcaacacatgctcgagtgtaagaaccagcccacagcctcgttccctaatcacggtcaaaccagaattctactccaggttctactctgtgaatctgctttctgtgaatctgttactctggggaccgcctataagttgaatcctacagtgtctccacttcagtgactggcttatttcacttttctcctctttatttatgagacaaaatttcgctcttgttgctcaggctggaatgcaatggcgtgatctcggctaatttttttgtatttttagtagaggcggggtttcaccatgttggccaggctggtctcgaactcctgacctcagacgatccactttggccttccaaagtgctgggattacaggcgcggcccacctttctcctcttaatcacacaggtaatccatacatacgacattcttttttttttttgacacggagtcttactctgtcacctaggctggagtgcagtggcgcaatcttggctcactgcaacctctgcctcccaggatcaagcaattctcctgcctcagcctcctgagtagctgggattacaggtaaccatcaccacacctggctaaattttgtatttttagtagagacggggtttcaccacgttggccacgctggtattgaactcctggcttcaagtgatcttcctgtctcggtctcccgaagtgctgggattacaggaatgagccactgtgcccggccaatacgacatctgtgcaatgaagtgcaacatataagacacccttcccccacccactgcccccaccaccgcccccacgcccccacccccatctccagatcagaacctggggctgtgcaattttaaacgttgtagccacttgctacttgggtagttgaagttcagtctcagccaggttggagtcctggactctggcccctcttttatttttattttttatttttttttgagacagagtctcgctctgtcgcccagactggagcgcagtggtgcgatctcggctcactgcaagctctgcctcctgagttcacgccattcccccgcctcagcctcccgagcagctgggactacaggcgcccgccaccacacccggctaatttcttgtattttttagtagagatggggtttcaccctgttagccaggatggtctagatttcctgaccttatgatccgcctgcctcgggcctcccaaagtgctgggatgacaggagtgagccaccgcgcccggcctctttttttttttttagacagtctctgtcacccaggctagagtgcgatggtgcgatctcggctcactgcaacctccaccttccgggttcaagcgattctcctgcctcagcctcctgagtatctgggattacaggtgcctgtgaccacgcccggctgatttttgtatttttagtagagacggggtttcaccacattggtcaggctagcctcaaactcctgaccccgtgatccttccgcctcagcctcccaaagtgctgggattacaggactctggcccatcttggctgctgccaatgtccttccttctatcttggtttttccacagttacgcacatgccagataacggcgagtctgttccccagcaactgcaacggatctgcccaccactgggaaatggaagaccttgcagcccaggtctttgtagaccaagattagattgtggtcaacaaacacctgaccttggcctttggaaccatcagccatgtcagctaaaataaaagcagaatctggctgggcgcagtggctcacgcctgtaatcccagcactttggggggctgaggtgggcagaccacctgaggtccggcgttctagaccagcctgaccaatatgatgaaaccccgtctctactaaacatacaaaaattagctgggcatggtggcgggcacctgtaatcccagctactcgggaggctgaggaaggagaattgcttgaaccctggaggcagaggttgcagtgagccgagattgcgccactgcactccaacctggactgcagaacaagactctgtcccaaaagcagataaataaaaataaataaaaataaaaatatggccgggcatggtggctcacacctgtaatcccaacactgggaagatgaggcgggcagatcacgaggtcagggattcgagaccagcctggccaacatggtgaaaccccgtctctactaaaaatacaaaaattagccgggcatgatgctgcatgcctgtaatcccagctactctggaggctgaggcaggagaatcgcttcatcccgggaggtggagcttgcagtgagctgagatcgcgccactgcactctagcctgggcaaaagagtgagactccatcgcaagaaaaaaaaaaaaaaaagctgcaagctctgtctcccgggttcaagtgattctcctgcctcagccttccaagtagctaggattatacgcgcccgccaccatgcctggctaatttttgtatttttagtagagatgcggtttcaccatgttggccaggctggtctcaaactcctgacctcacgtgatccacctgcctcggcctcccagagtgctgggattacaggtgtgaacccctgcgcctggccaagaaaagttgcttgaatgaagagtaaatagaagacccagaaagaaatgattcgtccgaggaaggtcacagaagcaacgtaatcaagatggaaatctgactcttcctaattttggccagacttcccatccctccaaagctttccagactcttccagatcattctagatatttccagaaatcattcgtgaaatctaactaggagtagtctgtaaacaatgtgtttcacacagatacaattcataaacgatgagaagacaaggacacttcatgaatgaaatttttacggccgggtatgttggctcacgcctataatcccaggactttggaagacccaggcaggaggattgcttgagtccaggagttcaagaccagtctgggccacatagtgagaccctgtcgctacaaaaaatttaaaaattaggtagatatggtggtgtatgcctctagttttagcttttttggaggctgaagcaggaggatctcttgagcccaggaggttgagctgcaatgagctacgattgaactactacactccagtctgggtgacagagaaagaggctgcctcaaaaaaataaaaataaaaaaataaggccggacgcggtggctcacgcctgtaatcccagcactttgggaggctggggtgggcagaccacgaggtcaggagatcgaggccatcctggccaacatgatgaaaccctgtctctactgaaaacacaaaaattagctgggcgtggtggcgtatacctgtaatcccagctactcgggaggctgaggcaggagaatcacttgaaccagggagtcagaggttgcagcgagaggagattgtgccactgcattccagcctggcaacagagcaagactccgtctcaaaaaagaaacaacaacagcaacaacaacaaaaaaaacataaaaaagttcgggcacggtggctcacacctgtaatcccagcactttgggaggccaaggtgggtagatctcttgaggtcaggagttcaagaccagcctggccaacaaacatggtgaaaccccgtctctactaaaaatacaaaaagtagccgggtgtagtcccagctactcggaaggctgaggcaggagaatcgcttcaacctgggagatggaagttgcagtgaactgagattgcgccactgggtgacagagtaagactcttgtctcaaaaaaaaaaaaagaaagaaagtttaatttaatgattcaaataatgacctgctcgagagataaatataaagtctaacgtaagaggtgtatactttttcctctgtcctgctgtcctcgccccacctcaccccaagtcccaacctgattgatcagtctcctttccctctggtagccccactcccatgaccgaaccgagaagtcatgcacccgcataagaactctaattttttttttcaaagtcttctcactgccccaaaaatagtttctttcattcccaggggatgtgaaagtgtctctcccaattttatttcaacctcccagcgttccacacatatgccttgcctcagccagctttcactgatctgccatttccacctcggcgctgctcctacctgcggaaatcctgtccatccatagtctgatttctgttgttccagaacattcttttttttttcccctggaacattctttaagatacctcaataaatgaaaccagagggtatagagcagtatgaatgggtactacaatgtacagggggaaatggaggggaatatgatatactctcctccttgtatatgcttagaatgttctagaaggatatgcttaaaaggttagcagtcctggccaggcgtggtggctcacgcctgtaatctcagcactttgggatgccaacgcggacggatcacaaggtcaggagttctagatcagcctgaccaatatagtgaaacctcatctttactaaaaatacaaaaattagccgggtacggtggcatgtgcctgtagtcccagctactttggaacctgaggcaggagaatcgcttgaactcgggaggcagaggttgcagtgagccgagactgtgccattgcactgcagcctgggtgacagaacaggactccgtctcaaaaaaaaacaaaaaaggtcagcagtcttaattgtcagagggcaggggacctgcatgggatggaggtttttccatgtgtccaccttttgagcccttttgctttttttttttaaatctttttattgtagcaaaatagatataaaatttaccctttttttttttgagacagggtctcactctgttgcccaggttggagtgcagtggcatgatcttggctcactgcagcctctgcctcctgggttcaagcgattttcctgcctcagcctcccgagtagctgggattacaggtgcttgccaccatacccggctaattttgtatttttagtagagacggggttacgccaagttggccaagctggtcgcaaactcctgacctcaagtgatccgcccccctcggcctcccaaagtgctgggattacaggcaggagccaccacgctcagccctaaaatttaccatattaaccattttcaagttcagaggcattaaagtatactcacattgttgttcaactgtcaccactactcacctgcagaagtttttcatcttgcaaagtgaaaaccccatacccaatttcccgttcttcctctcagcccctggtaatcactattctactttttgtctactttttgtatgaatttgcctattctaggacctaatagaagtggagtcaaacctgtttgtccttttgtggctggcttatttcacccggccttatatcctcaaggtttatccatgttggaggatgcctgaatttccttgtttttaaggctaaattttattctattatattaatatgtcatattttgtttatcctgatggacacttgggttgattccacctttggccattttgaagaagcttctatgtacatggtatacacatatatctttgggtctctgctttcaatgcttttggggatatttcagatgtggaatttctggattataaggcaatttttttttttgagacagactctcgctcttgtcgcccaggctagaatgtggtggtgtgatctattttttttttttttttgagatggagtctcgctctgtcgcccaggctggagtgcagtgtcacgatctcagctcactgcaagctccgcctcccaggttcgtgccattcttatgcctcagcctcccaagtagctgggaccacagccgcccaccacctcacccggctaatttttgtatttttagtagagacagggtttcactatgttggccaggatggtctcgatctcctgacctcgtgatccgcctgcctcggcctcccaaagtgctgggattacaggcgtgagccactgcacccggctggtgtgatcttggctcgctgcaacctctgcctcccaggttcaagcgattcttgtgcctcagcctctccgcagctgggactacaggtgtgcgccactgtgcccagctactttttaaaaatatatgtgtatttattatacttttaagttctgggatacatgtacagaacgtgcaggtttgttacataggtatacatgtgccatggtggtttgctgcacccatcaaccggtcatctacattaggtatttctcctaatgctatcccttccctagccctccactctcccggttttttgttttgttttgttttgttgttttgtttttagtagagacagggtctcaccatgttgcccaggctagtcttgaactcctgacctcaagtgatccgcccacctcagcctcccaaagtgctgggattacaggtgtgacccactacactcggccttattttcacttatttatgcaattttcactattgctatattctaggaggcactgtggaattgcactgtggaattttagtattgctgtatttcagcaagccatgaggtctgtcagcacacggctttgggcattttgtgaagataactgatgccagctgagccaaggcaggttcctgattccacccactggcaggcaccgaggtctctgctgttactgatggtttctctgtggattgatgggcttaaggccagaccacagctgcaatggctcacctctgccaaaggccaggctcgttggggcagagacctattccggactgagcctcctggtgaattagagaggtagaaaatgggaggacgggggcaggtgggctattacagcgaggaaaatgcccaccctgagttgtattagataactttgggagttcaggaactttccaataaagtgggttccacagcaggattacttactgactccctaatagaaagaaggcaggcacaggccgggcgtgttggctcatgtctgtaatcccagcacgttgggaggctgaggcgggtggatcacaaggtcaggagatccagaccatcctggctaacaaagtgaaaccccgtctctactaaaaatacaaaaaattaggctgggcgtggtggctcgtgcctgtaatcccagcactttgggaggctgaggcgggcggatcacgaggtcaggagatcgagaccgtcctggctaacacggtaaaaccccatctctactaaacatacaaaaaaaaattagccaggtgtggtggcgggcgcctgtagtcccagctactcaggaggctgaggcaggagagtggtgtgaactcgggaggcgcagcttgcagtgagccgagactgcgccactgcactccagcctgggcaacagacagagactccgtctcaaaaaaaaaaaaaaaaaatacaaaaaattagccaggcgtggtggcacgtgcacgtgactgtagtcccagctacttgggaggctgaggcaggagaattgtttgaacccgggagacggaggttgcagtgagccgagatcgcgccactgcactccagcctgggtgacagagctagactccgtcaaaaaacaaaaaacaaaaaacaaaaaaacaaaaaaaaaaaaacagcaggaactggcaggtcttccctgaagagataaaaaaaaaaaaatgcagttgcaacacaaaagcagccacagagaaaagcaaacccatatatggtatttattatgcaccgagtgtggctctaatcacttttttttttttaattgagagacagcctggctctgttgattgggctggagtgcagtggcgcgaccgtagctcattgcagcctcaacctccttggctcaagcaatcctcctacctcagcctcctgagtagctgggaccacaggtgtgagccaccacgcctggctaattgttttttttttttttgtagagacagggtctcactatgtggcccaggctggtttccaactcctgggctcaagtgatcctcccacctctgcctcccaaagtgctggggattacaggcatgagccacctcgcctggcctctagtcgctttatatattttaacttaatccttacaagagccctgtgagctagttacaggagcacaaatggaaaccaagaaacagaaaaatttatcagcatgactcagtcctcagagccatgtatggccgtgtccgtgcatggcaggcaggtcaggggcctggggaacgctgttctggaaaccttggccaggccttggcacccgaggaatgtgcttttcagagtttttgtggctcttttccagacctgccctgacctctagctctgggaactatgtaagccaagtgccttccgggaagggagtccctctcctggtaactctttctgggtaaccagatgtggactcatgacacacactgagcctacgtcttataattttttgtttttgtttttgagacagtttcggtcttcttgcccaggctggagtgcaatggtgcgatctcggctcactgcaacctctgcctcccaggttcaagcgattctcctgcctcagcctccctagtagctggaattgcaggcatgcgccaccacgcctggctaattttttgtatttttttttttttagtagaaacggggtttcaccttgttagccaggctggtcaccaactcctgacctcaggtgatccgcccacctctgcctcccaaagtgctgggattacaggtgtgagacagctgtgagccaccacgcccggcgcattttttttttcttttttttcagagggagtgtccctctgtcacccaggctgaagtgtagtggcgtgatctcggcccactgtaacctctatctcccaggttcaagtgattctcctgactcagcctcccaagtagctgggactacaggcgcctgctaccatgcctggctaatttttgtagttttagtagaaaccgggttttgccatgttggccaggctggtctcaaactcttgacttcaggtgatccacctgccttggccttctgaagtgctgggattatagggcatgagccactgtgactggccatcttaaattttttttttttttttttttttttttgagacagggtttcactctgtcgcccaggctggagtgcaaaggcgcgatcttggttcactgcaagctccgcctcctgggttcatgccattctcctgcctctgcctcatgagtaactgagactacaggcgcccaccaccacgcccggctaatttttttgtatttttttagtagagatggggtttcaccttgttagccaggatggtctcgatctcctgacctcgtgatccacccgtctcggcctcccaaaatgctggcattacaggcgtgagccaccgcacccagccttaaatttttttttaagggaaatcaaacccagtgatattgggccagtacagtggctcacacctgtaattccaccactttgggaggctgaggcaggtgaatcacctgaggtcaggagttcgagaccagcccggcaaacatggcgaaaccccgtctctactaaaaataagaaaattagccgggcgtagtggcatgcacctgtaatctcagctactcgggaagctgaggcatgagaatcgcttgaacctgggagcaggatgttgcagtgaaccgatatcacaccactgcactccagcctgggtgacagagcaagactctgtctcaaaaaaaaaaagaaaaaaaaatccagtgatacttactttttaaatttttatttacttattttttgctttaagttgaatctttaaacttatctttatttttgagacacagtctcactctgtcgcccaggctggagtgcagtggtacaaccacagctcagtgcagcgttgacctcctgggctcaagccatcctcccgcctcagcctcccgagtagctgggactacaggcgcacacaaccatgtccagcttatttttgtattttttgtagagacagggtcccactgtgttgccctggcttgttctgaactcctaggctcaagtgatccccccgcctcaccctcccaaagtgctgggattacaggcatgagccaccacatccagacttcacttttttgtttaatgtcgcaaatggcataaggaatgggattcaatggggacacatttataaacgttgcagcagctcctagaacttgcctatccttgtaaacttctctaggtgattgctaattacttctttttttttttttttttttgagacggagtctcactctgtcgcccaggctggagtacagtggcgcaatctcgtctcactgcaaactccacctcccgggttcacgccattctcctgcctcagcctcccgagtagctgggactacaggcacccgccaccacgcccggctaattttttgtatttttttttagtagaggtggggtttcactgtgttatccaggatggtcttgatctcctgacctcgtgatccacctgcctcagcctcccaaagtgctgggattacaggcgtgagccaccatgcccagcccgctaattatttcaatttgaccttgacactgagcctgccaagtaggttcaagcattttgatggcccctttacaggttgggaaagctaatttatctgtccaaggccgaattctgaaactgagtcttaactgccaaaaattcttatcatcaatttcttcttctgggttgggcacagtggctcatgcctgtaaagccagcaatttgagaggcatcatgatgcaagaggaagaggattgagtgaagctaggagtttgggaccagcctgggcaacatagtgagaccccatctataaaaaaaaattaaaaattagttgggcatggtggtgcactcctgtggtcctagctattcaggaggctgaggtgggaggattccttgagcccagggttgacgctgcagagagctgtgatcacgccactgcagtccagcctgagtgacagctggaaataatgataaataaataataaataattatttaaaaaattataataaaaataattaaaaaattattttccctgattaatctttttttttgtccttctgagagttcaatttgtcccttttctgcctggtctcctaggtttccctaaaatcctgctgagaggttagcactgcctgccaaagtcagtttgcaaaatcccagagaaatccagcttattcctgggggaaccgccaagactgcccagccctgtgtggggttcaggcaagtttctcacatgtgcctttttggcaagaggcctctggcaaccccatgagtccccaaagagactcaattctaaaagttggtctccaccagctctctgtggcttaggggttcaagttcaactgtgaaagccctgttttgttttgattttgctttgagggagaggaaaccgcccttctgtttgttcaactccttctcctaaggggagaaatcaatatttacgtccagactccaggtatccgtacaattgatttttcagatgtttatactcagccaaaggcgggatcccacaaaacaaaaaatatttttttggctgtacttttgtgaagattttatttaaattcctgattgatcagtgtctattaggtgatttggaataacaatgtaaaaacaatatacaacgaaaggaagctaaaaatctatacacaattcctagaaaggaaaaggcaaatatagaaagtggcggaagttcccaacatttttagtgttttccttttgaggcagagaggacaatggcattaggctattggaggatcttgaaaggctgttgttatccttctgtggacaacaacagcaaaatgttaacagttaaacatcgagaaatttcaggaggatctttcagaagatgcgtttccaattttgagggggcgtcagctcttcaccggagacccaaatacaacaaatcaagtcgcctgccctggcgacactttcgaaggactggagtgggaatcagagcttcacgggttaaaaagccgatgtcacatcggccgttcgaaactcctcctcttgcagtgaggtgaagacatttgaaaatcaccccactgcaaactcctccccctgctagaaacctcacattgaaatgctgtaaatgacgtgggccccgagtgcaatcgcgggaagccagggtttccagctaggacacagcaggtcgtgatccgggtcgggacactgcctggcagaggctgcgagcatggggccctggggctggaaattgcgctggaccgtcgccttgctcctcgccgcggcggggactgcaggtaaggcttgctccaggcgccagaataggttgagagggagcccccggggggcccttgggaatttatttttttgggtacaaataatcactccatccctgggagacttgtggggtaatggcacggggtccttcccaaacggctggagggggcgctggaggggggcgctgaggggagcgcgagggtcgggaggagtctgagggatttaagggaaacggggcaccgctgtcccccaagtctccacagggtgagggaccgcatcttctttgagacggagtctagctctgtcgcccaggatggagtgcagtggcacgatctcagctcactgcaacctccgcctcccgggtttaagcgagtctcctctctcagcctcccgaatagctgggattacaggcgcccaaccaccacgcccgcctaatttttgtatttttagtagagacgggttttcaccattttggccaggctggtctcgaaccccgacctcaggtgatctgcccaaaagtgctgggattacaggcgtcagccaccgcgcccggccgggaccctctcttctaactcggagctgggtgtggggacctccagtcctaaaacaagggatcactcccacccccgccttaagtccttctgggggcgagggcgactggagacccggatgtccagcctggaggtcaccgcgggctcaggggtcccgatccgctttgcgcgaccccagggcgccactgccatcctgagttgggtgcagtcccgggattccgccgcgtgctccgggacgggggccaccccctcccgcccctgcccccgcccctttggcccgccccccgaattccattgggtgtagtccaacaggccaccctcgagccactccccttgtccaatgtgaggcggtggaggcggaggcgggcgtcgggaggacggggcttgtgtacgagcggggcggggctggcgcggaagtctgagcctcaccttgtccggggcgaggcggatgcaggggaggcctggcgttcctccgcggttcctgtcacaaaggcgacgacaagtcccgggtccccggagccgcctccgcgacatacacgagtcgccctccgttatcctgggccctcctggcgaagtccccggtttccgctgtgctctgtggcgacacctccgtccccaccttgtcctggggggcgccctcgccccaccagccccgatcaagttcacagaggggcccccggccaccctcaaggcctcggttccttacgaggttgaaacgttgcctcagaatctccccgcccctccttggtctgcagccgagatcttcagccacggtggggcagctatcccccgggaccgaccccctggggtggcctcgcttcttcagaggctgtgaatggcttcggttcagctgtccaagcggcgatttttcctctgggtgaaatggattagattttagatttccacaagaggctggttagtgcatgatcctgagttagagctttttaggtggctttaaattagttgcagagagacagcctcgccctagacaacagctacatggccctttccctcctgagaaccagcctagcctagaaaaggattgggattgcctgatgaacacaaggattgcaggaaactttttttttaattggcaagggggttggctttgactggatggagagctttgaactgccttgaaattcacgctgtaactaacacaccagtttcctctgggaggccagagagggagggagggtgtaatgaaatacggatgattgttcttttatttttatttacttatttattttttaactttttgtagagatgaggtctcgcttggttgctcaggctggtcttgaactcctggcctcaagcgatcctcctacctcagcctcccaaagtgttgggattacaggagtgagccaccgcgccccaccggggatgatgatgattgcaaacattctgccactcagttttacaaaagaaagagaggcactggattaatgtgtatctcactcaccaatcaacctcttccttaagagaaaatgttaaggaagtcttaggcaaggccttgtttgttcatcactttagtttctctctcccgggatggctgagaatgtgatgtttcctctgttgtcaaggagactacacccctgatgttttcctccagacttctgagagctggtgtgtgtttctagcactttctagctgcaccacctcacgctgtagctggcttcaaggcatatccaggggggagtttcttgtccatttcctttacaaagggaagttgttggaatctgaaccgcaagccttcacttagaccaaaatcaggcaacagcggtgagcgcagctccaaacgtgtcaatgactcacccaaatttgagtaagggagttggctgctttaacgagccgcagggtgattcccttgtcatttccggaaatacctatcttccagggaacactgggaaaaaacagggagacctttgttgagacagaaaacctgtaggggaattctgttcctcattcctgctcttatctgtagacttcctccctgataagatccaattctagatgggtcggttgctccttgctttgatgggtgctttgatgggctttattattattattattattattattattattttgatgggctttttgatgtcccttttccttccacactctgtcccaactgtcaagcaaatagccttttgttgctaagagactgcagatgtaaccgaccagcagcaaacagtgagtcaggctctctcttccggaagcaaaatcaattgctgagatcactctggggaaaatacccaccttatttggaaagaagcactgatcaattgatgtctattttttttttttttgagttggagtctcgccctgtcacccaggctggagtgcaatggcataatctcgcctcactgcaatccccgcctcccgggttccagcaattctcctgcctcagcctcctgagtagctggaattataggcgcctgccacaacacccggctaatttttgtatttgtagtagagatggggtttcaccacgttggccaggctggtctcgaactcctgacctcgtgatccacccgcctcagcctcccaaagtccaaggattgcaggcgtgacccactgtgccagccaatcaattgatttctcattcattttcagctggctctgttcccttaagccaggggattttcgtttgtttgtttccccttcaaggaaatgattctagctacagttttgatttccttgtacaactgttttcagtagcacagggaaagaaaacatcgaaagcattcaccacctcatttgtgtgctgggggaaaaagcagaaatgtgtattctctttttttgtttcgatgaccttgttcctgacttgttactcgtgacttgagagatcagagggctagaggactagaatttatagaggtgttttttttgtttgtttatttttgttcgagttgcccaggctggagtgcagtggcgcaatctcggctcactgcaacctctgcctcccaggttcaagcgattcttcggcctcagcctcctgagtagctggaactacaggcgcccgccaccacacccagctaatttttgtatttttcagtagagatgggatttcaccatattggtcaagctggcctcgaactcctgacctcgtgatccacccgcctcagtttcccaaagtgctgggagtacaggcgtgagccgccgtgcccggcctttttgtgtttttgtgtttttgagaggagctcattgctttttaggcttccctagcgtgagaaaatctggggatccatgctctagtttacttcctttttttttttttttttgagatggagtctcgcttagattgcctaatctcagctcattgcaacttctgcctccggggttcaagggattctcgtgtctcagcctcctgggtagctaggatacgggcacccgctaccatgcctggctaattttgtacttttagtagagacagggtttcgccacgttggccaggctggtctcgaactcctgacctcaggtgagccgcctgccttggcctcccaaagtgctgagattacaggcgtgagccaccgcgcttggcctaatttgcttttcctgaaattcaaatggtctaatatgaaaaacgccaaccttgcttgaaagaataagaaagaggtgcggtttcgttgggccgttgatgtttggaacaggactggttttgtccccttgctcggaaagggcagcaactgtgaggacagctccctgacgtgctctcactcagcactgttccgttcctgagcactgtccccactagctaggccaagggagctcatttggcaggcaactgctgtctggctgcgcctgtggcagtaaaatctgcctttattttttggaggcagggtcttgccctgtcgctcaggctgaagtgtgcagttatagctcactgcagcctccagcttctgtactcaactgatcctcctctctcagcctcctgagtagctgggactatacgcacgtgttaccactcccacctcagtttgtttgtttatttatttatttatttatttattgagatggagttttgctcttgctgcccaggctggagtgcaatggcgcgatctcggctcaccgcaacctccacctcctggttcaagcgattctcctgcctcagcctcctgagtagctgggattacaggcatgcaccaccacgcccggctaattttgtatttttcgtagagatggggtttctccacattggttcaggctgttctcgaactcccaacctcaggtgatccacccgcctcagcctcccaaagtgctgggattataggcgtgagcccccgaacccggccactcccagctaagtttaaattttttgtttgtttgttcgtttgtttttattttttgagacagagtctcccgcccaggctggagcgcagatcactgcatccttgacctcccaggcttaagccatcctccccactcagcctcccaagtagctgggattacaggtgtgtgccactatgcttggctaagttgtgtattttttgtagagatggggttcaagggattctcgctttgttgcctcggttggtctcaaactcctgggctcaagcagtcctccctcctcagcctcccaaggtgctggggaaatccacttttgaaacattgtctggagagttgcccaggtggtagatcacagaaataggtcatcgtggggtccttcccatgggtgcagtcttgagccacctgtggccagcaaatatttggagaataatagtcaggggagagcttgaggtccagggaaaggttttgtttttcttcagggaaaggtttttattgttctttatccctccttaaaggaccttcaggtgttactgacattcccggtctacccagtggcacatttagtttgtaagctgggccctcgtacagaggtagggaggtgagagcattggattagtggtcaccaaagctgcggtcacctagtggggtgatcagaggctcctcccttaagatcttgattgccaacgcctctggcccaactttcctttttatttatcgcaagcctcctggaatctcaattgctttttgcccacccggtgtgtcagcacaagaaatgagtcatttcctcctttaagcacagttgaaattgagctgtgagtcagtgaggtgtgtacgatattgtcaaagcggggtgtgtacagtattgacagatctgtagttgggcaagagaattatcagagtttgtgaccacagcagattccaaagctcgactcattttcttctctcttccttcccttttttcttttctttttttttttttttttgacagagtctcgctctgttgcccaggctggagtgcagtggcacaatctgggctcactgcagcccctgcctcctgggttcaaatgattctcatgtttcagcctcccgagtagctgcaattacaggcattcgggttcaagtgattctcctgcctcagccacctgagcagctgggattacaggcgcccgccaccacgcccggctaatttttgtatttttagtagagacggggtttcaccatgttggccaggctggtctcgaactcctgaactcaggtgatccgcccacttcggcctcccaaagtgctgagattacagacgtgagtcaccgcgcccagcctgttctgttctttaattctcaaaacaccctctaggaagtagagactgccattctcccccattttacagatcaggaaactgagtcccagaaggatttagtcagttacccaagttgttctagttaaatggcctggaaagccagtgaagcccaggattgtctatctaacccccttactactctaactttcagggaatccacatgaatgtgctgggtcaaccatcaaagttgaaatggataaagggggctggatgcggtggctgatgcctgtaatcctagcactttgggaggccgagatgggtgggtggattgcttgagcccaagagtttgagaccagcctgggcaacatagtgagacacctgtctctgcaaaaaataaataaaaagttagctgagtgtgatggtgcacccctctagtcacagctgttgagttaggcttaggcaggaggatcgcatgaacctgggaggtggaggcggccgtgagcctcagtcatgccactgcactccaacctgggcaacagagtgaaagccggtgtccgaaagagaaagaaaaaaagacatagatacatcttttaaagttaggttgtatgttaattacctacaactcagtttcaactgtgcttaaaggaggaaatgactcatttcttgctacatatcaaattagcccaaaatgtagtggcttaaaacaacacatttatgatttctcagtttttgcgtgtcaggaatttggaagcagcacagctagacggttccagctcagggtctctcatgaagttgcaatcaaaatattggcaggagagaaaaacatattttcagaagctgcaggcataggaagacttggctggggttgaaggatccacttccaagatggcgcactcagtggctcttggctggaggcctcagttccctgctgcgtggagctctccctccagctgcttgagtggactcatgacatgcagctggcctcccctggagcagtcgatccaacaatgagcatggccatgaactaggctcagaagccactccctgtcgtctctacattttcctatcagaagcaagtcattaaaagtccagtgccactccaggggagacgaattaggctctgccttctgaaaggattatcacagaagatgcggtcctatattctttttttaaaattattcttttttttattttgtagagatggggtcttggtatgttgcctaggccagtctggaattcctgggctcaaacaatcctgtctctgcctcccaaagtgttgggattacaggcatgagccactgcacctggtcatgtggtcatattttctttttcttttttttttttttttgagacagagtctctgtcgcccaggctggagtatggtggcgtgatctcagttcactgcagcctccgcctcccgggttcaagcgattctcctgcctcagcctcctgagtagctgggattacaggcgcccgccaacatgcccagctaatttttttagtagagatggggtttcaccatgttagccaggatggtctcgatctcctgatttggtgatccgcccaccttggcctcccaaagtttcaaccatcgatcagaacttattgatgtacttatgtagctaggcacggtggcgcgtgcctgtaatcccagctacttggaagggttaaggcaggagaatcgcttgaacctgggaggcagaggttacagtgagtcaagatcataccattgcactccagtctgggcaacagaatgagactctgtctcaaaaacaaaaaacaaacccttgtatgtgattttcctggatagcatctgttacatcttcacaaagataaaaagtcagacttggctgggcatggtggctcacacctgtaatcccagcactgagaggctgaggcaggcagatcacttgaggtcaggaatttgagaccaggctgggcagcatggtgaaaccccgtctctacaaaaaatacaaaaattagccgggtgtggtgtcacgcacctgtattcccaagctactcaggaagctaaggcaggagaatcacttgaacccagaggtggaggtttgcagtgagttgagattgtgccattgcactccagcctgggcgacagagtgagactctgtgtcaaaaataaaataaaataaaattttaaaaaaggcagatttttttttcttcttggtattgttaccttattatagtaataataagtgcatagtgcatgctgagataagcaatcataatttgttattgcggccgggcatggtggctccagcctataatcccagcactttggtcaggagttcaaggccagcctggccaatatagtgaaactccatctctactaaaatacaagaaattacctgggcatggtggcagttgctggtgatccccagctacttgggaggctgaggcaggagaatcgcttgaacctgggaagcagaggttgcagtgagccaagattgcaccactgcactccagcctgggtgacagagtgagactctgtctgaaaataataataataataatttgttattgcttttattgccttagtttacatagggaatcaaagtttatactttgatttataaaagttgctttgattctagttcacagaaccagaatctttcatataaaggtattagagggcccagtgtggtggctcatgcctgtaatcccagcatattgggaggctgaggagggaggatcactttaggagtttgaggccagcctaggcaacatagtgagaccttgtctctacaaaaaattccaacattagctgggcatggtggcatgtgcctgtagtcccatttatttggggggctgaggcaggaggatcacttgagcccacgaggttcaatccaggttgcagtaagccatgatcctgccactgcactccagtttgggtaacagagcgaagctatgtctcaaaaaaagaaaaaaaaagtattctaaatccaaatttaatatataaaactaaatgcaggccaagtgtggtggcatatacctataatcacaacactttgggaggctgaggtgggaggattgcttgagcccaagagttcaagaccagcctaggtaacacagtaagaccccatctctacaaaaagtagaaaaattagcctggcatggtggtgagtgcttttaatcccaactacttagggggctgagatgggaagattgcttgagcctcagagtttgaggctgcagtgggccgtgatcgctccactgatcgctctaaagtgagaccctgtctcaaaaaaaaagaaaatagaagaaaactaaatacattcaataagactttgatctcttttccaaggtgtaaatatattttgggaaattttccagttactttgttctcattttaatgtaataatctaagtcttggttttctaaggaaaagttttctcttattatatcttttgttaatgtttctctcccatttcttttgatctgatcttcagatacatgattatcttcactgctaaatttgtgttctctggcctctacatttataatttctcataattctttatctaagtatttcttccctacctactgaagaaaactcaagttttcttccaccttaatgattatgctgtgtctgtgagttttcttcatgactctttacagtacaagttttttgtttttgtttttttaatggtcagatggatagaacaacacaggttttgtttgttttgttttaacttttaaaaaaattataatagataaagggtctcactacgttgtccaggctgatctcatactcctgggctcaagcaatccacccacctctgcctcccaaagtgctgggattacagtcatgagccaacatgcctgggcagtacaggttttttttgagacggagttttgttcttgttgccgaggctggagtgcaatggcacaatcttggctcaccacaaagtctgcctcccaggttcaagtgattctcctgcctcagcctcctgagtagctgggattacaggcatgtgccaccacgcccagctaattttgtatttttagtagagacggggtttcaccatgttggccaggctggtttcgaactgctgacctcaggtgatctgcccacctcggcctcccaaagtgctgggattacaggcatgagccaccatgcccagctgtagtacaggttttaatatgctaaatactcttcctttctttattaatgtgcatggaagttctaatatttttttcccataccccagagagtccatattttggaatcaacaacactagcctttgttgacaagtgtctctcttgggttccttctttgtgtcctccactgaattttggggttcataaaatttcatttgttgtgcttgcttaattccctgggaatcagactgttcctgatcggatgacatttctggttaattctttagttggcaggaaatagacacaggaaacgtggtcagtttctgattctggcgttgagagaccctttctccttttcctctctctcagtgggcgacagatgcgaaagaaacgagttccagtgccaagacgggaaatgcatctcctacaagtgggtctgcgatggcagcgctgagtgccaggatggctctgatgagtcccaggagacgtgctgtgagtcccctttgggcatgatatgcatttatttttgtaatagagacagggtctcgccatgttggccaggctggtcttgaatttctggtctcaagtgatccgctggcctcggcctcccaaagtgctgggattacaggcaccacgcctggcctgtgacacgattcttaacccctttttgatgatggcggctggaaaagtggccagtggattttgatgtattcaatcatgaattaggaggtggggagagaatgaattattggagctttccttaaagccattaaatggctctattgttttttcaattgatgtgaatttcacataacatgaaattaaccagctcagtggcattaatacatctgcaatgctgtgtggccaccacctctatcttgttccaaaactttgcataacctaatgtctttttttttttttttttttgagacggagtctcgttccatcacccaggctggagtgcagtggtgtgatctcagctcactgcaacctccgcctcccaggttcacgccatcctcctgcctcagcctcccgagtagctgggactacaggcaccctccaccacatccggctaattttttgtatctttagtagagatggggtttcaccatgttagccgggatggtctcgatctcctgacctcgtgatccacctgcctccgcctcccaaagtgctggcattacaggcgtgagccaccatgcccggcctatttttttttttaagagatggagtctaattctgttgcccaggctggagtccagtggtaccatcatacttcactgcagccttgacctcttgggctcaagtgattctcttgcctcgaactcccaaagtattgggattacaggtgtgagccaccgcactcagcctaatgtccagtttttaacaagctccatttaaatgccctccgttttgacccataaaggggtaggcttggccgggcacaatggcttgtgtctgtagtcccagctacttgggaggctgaggcagaaaggcagaaagattgctttataaagcccaggagtttgagggccacctgggtggcatagctagacctcatctctaaaaaataagtaataaataaatatttgtttttgtttttttctttttcttttcttttttttttttttttgagacggagtcttgctctgttgcccaggctggagtgcagtggcgcgatctcagctcactgcaagctgtgcctcctgggttcatgccattctcctgcctcagcctcccgagtagctgggactacaggcgcccactaccacgcccagctaattttttgtatttttagtagagatggggtttcaccacgttagccaggatggtctcaatctcctgacctcgtgatccgccagctttggcctcccaaagtgttgggattacaggcgtgagccactgagcccgccccatatgtatgtatatatatatttttttaaaatgggagaccaggcatggtggctcatgcctagaatcccagcactttgggaagctgaggtaggcggatcacttgaggccatgagtttgagaccagcctgctcaacatgatgaaacttctatctctactaaaaaaaaaagtgggattaggtcaggcacggtggctcacacctgtaatcccagcactttcagaggccgaggcaggaggatcatgaggtcaggagatcgagaccatcctggctaacacggtgaaaccccgtctctactaaaaaaatacaaaaaattagccaggcgtggtggcgggtgcctgtagtcccagctactcaggaggctgaggcaggagaatggcgtgaacccgggaggcggagcttgcagtgagccaagatcgtgccactgtactccagcctgggcgacagagcaagactctgtctcaaaaaaaaaaaaaaaagtgggattgacattctcttcaaagttctggggttttcctttgcaaagacaggattggcaaggccagtgggtcttttttgtgtgtgtgtgtgtgacggagtctcactctgccacccaggctggagtgcaatggcaggatctcggctcaccgcaacctcctcctcccaggttaaagtgattctcctgcctcagcctcccgagtagctgggactacaggtgcccgccaccacacccaactaatttttgtatttttagtagagacagggtttcactatattggccaggctggtcttgaacccctgacctcacgtgatccacccgccttggcctcccaaagtgctgggattacaggcgtgagccactgtgctcggcctcagtgggtctttcctttgagtgacagttcaatcctgtctcttctgtagtgtctgtcacctgcaaatccggggacttcagctgtgggggccgtgtcaaccgctgcattcctcagttctggaggtgcgatggccaagtggactgcgacaacggctcagacgagcaaggctgtcgtaagtgtggccctgcctttgctattgagcctatctgagtcctggggagtggtctgactttgtctctacggggtcctgctcgagctgcaaggcagctgccccgaactgggctccatctcttgggggctcataccaagcctcttccgcccttcaaatccccccttgaccaggaggcattacaaagtggggatggtgctacctcttcgggtttgtcacgcacagtcagggaggctgtccctgccgagggctagccacctggcacacacactggcaagccgctgtgattcccgctggtcgtgatccccgtgatcctgtgatccccgccccgtgaggctgaacacatagtgacgcttgctagccaagcctcaatgacccacgtaacatgaagggggaaaagccagaaagttctgccaaggagcaaggccaagaatcccgaagggaaatggactttgaagctgggcgtcttcttggctgtcttaatacaagtggcacatccaaatccaaaaccccgaaattcaaagtcttgagcacccgaaattctgaaacgtcttgagcactgacctttagaaggaaatgcttattggagcattttggatttcggatttttaccactgagtgtggagtcctaattaggaaaaaaaccaggctgaccgaaccaaaggaaagcaataaaagaaggcagatagggtcaggcacggtggctcacccctgtaatcccagccttttgagaggctgaggcgggtggatcacttgaggtcaggagttcgagagcagcctggccaacacggtgaaaccccatctctactgaaaatacaaaaactagccaggtatggtggcgtctgcctgtaatcccagctactcgggaggctgagacaggagaatcacttgaacctgggaggcagaggttgcagtgagccaatatcacgccattgcactccagcctgggggacaagagcgaaattctgtctcaaaaaaaaagaagaagaaggccgacaaactatgtaactctgcctttctccatggtccagaacacacagccctcctgcgtaaataactccttatcttcctgctcccagctatcatcagacacctcggctgatagaaaattgcaagttagctcactgcaacctcggcattataagtactgcacaaagccctcttcagcgcacagcacaagcaccattctataaaatctccagcaagcggccaggtgcagtggctcatacctgtaatcccagcattttgggagactgaggcgggcggatcacctgaggtcaggagtttgagaccagcctggccaacatggtgaaaccccgtctctattaaaaatacaaaaaaattagccaggcgtggtggcaggtgcctgtaatcccagctacttggaaggctgaggcaggagaatcgcttgaacccgggaggtggaagttgcagtgagccgagatcttgccatcgcactccagcctgggggacaagagtgagacttcgtctcaaaaaaaaaaaaaaaaattcccagcaagcctttgtcttctggcagtcagctcctctcttgctgacctgctcattgctttcttgcaaggtattttcctacctactttctggaataaatctgtctttctgtacttacaactaccttttttaaaatttctttcttttttgagatggagtctcactctgtttgcccaggctggagttcagtggtgcaatctcagctcactgcaacctctacctactgggttcaagcgattctcctgcctcagcttcccgagtagctgggattacaggcgtgcaccagcacgcaggctaatttttgtatttttagtagagacggggtttcaccatgttggccaaggtggtcttgaactcctgacctcaagtgatcctcccacctcagcctcccaaagcgctaggattacggccatgagccactgaggccggctgcacctacaactgtcttgataaattcttacccccacaccactggtccagatagtcagtgctcacccacaacattaaggatattccaaatttgaaacattccaaaatcagaaaaatattccaactctgaaaatattccaaaatccaaaaaaattcaaaatccaaaacacttctggtcccaagcattttagagaagggatactcaacccaaaataaggacagcaattctataaattgtgctaccatcttgcaggtctcagtttaacagctttacacctattagcgcaccagtgctcatagcagtgctgggaaatgtgtacagatgaggaaactgaggcaccgagagggcagtggttcagagtccatggcccctgactgctccccagcccgcctttccaggggcctggcctcactgcggcagcgtccccggctatagaatgggctggtgttgggagacttcacacggtgatggtggtctcggcccatccatccctgcagcccccaagacgtgctcccaggacgagtttcgctgccacgatgggaagtgcatctctcggcagttcgtctgtgactcagaccgggactgcttggacggctcagacgaggcctcctgcccggtgctcacctgtggtcccgccagcttccagtgcaacagctccacctgcatcccccagctgtgggcctgcgacaacgaccccgactgcgaagatggctcggatgagtggccgcagcgctgtaggggtctttacgtgttccaaggggacagtagcccctgctcggccttcgagttccactgcctaagtggcgagtgcatccactccagctggcgctgtgatggtggccccgactgcaaggacaaatctgacgaggaaaactgcggtatgggcggggccagggtgggggcggggcgtcctatcacctgtccctgggctcccccaggtgtgggacatgcagtgatttaggtgccgaagtggatttccaacaacatgccaagaaagtattcccatttcatgtttgtttcttttttttcttttctttctttattttgtttttgagatggagtctcactctgtgatttttttcatctctaaatttcctacatccatatggccaccatgaggccccaggctggccgatggttgctgttagcttattgggaaatcactgtttggaaggtgctggttgttttttgttgtttgttgtttttgtttttgtttttgttttgagacggagtctcgctctgtcgccagggtggagtgcagtggcgcgatcagctcactgcaacctccgcttcctgggttcaagccattctcctgcctcagcctcccaagtagcgcggattacaggcatgtgccaccacctccggctatttttttttctatttagtagagatggggtttcaccatgttagtcaggctggtcatgaactcttgacctcaggtgatccacccgcctcggcctcccaaagtgctgggattacaggcgtgcactgctgcacccagcctttttttgtttttttgagacagggtcttgctgtcacccaggttgaagtaaggtggcacgattatggctcactgcggccttgatctccttggctcaagcgatcctctcacttcagcctctcaagcagttggaaccacaggctgtaccaccaagcctggccaatttttttgtacagacacaggctggtcttgaactcctgggctcaagcaatcctcctgccttggcctcccaaagtgctgggattccaggcatgagccgctgcacccggcaaaaggccctgcttctttttctctggttgtctcttcttgagaaaatcaacacactctgtcctgttttccagctgtggccacctgtcgccctgacgaattccagtgctctgatggaaactgcatccatggcagccggcagtgtgaccgggaatatgactgcaaggacatgagcgatgaagttggctgcgttaatggtgagcgctggccatctggttttccatcccccattctctgtgccttgctgcttgcaaatgatttgtgaagccagagggcgcttccctggtcagctctgcaccagctgtgcgtctgtgggcaagtgacttgacttctcagagcctcacttccttttgttttgagacggagtctcgctctgacacccaggctggagtgctgtggcacaatcacagctcacggcagcctctgcctctgatgtccagtgattctcctgcctcagcctcccgagtagctgagattaaaggcgtataccaccacgcccggctaattttttgtatttttattagagacagggtttctccatgttggccaggctggtcttgaactcctggtctcaggtgatccacccgcctcggcctcccaaagtgctaggattacaggtgtgagccactgcgccaggcctaatttttttgtatttttagtagagatgcggttttgccatattgcccaggctggtctcgaactcctgggctcaagcgatctgcctgccttggcctcccaaagtgctgggattacaggcacaaaccaccgtgcccgacgcgttttcttaatgaatccatttgcatgcgttcttatgtgaataaactattatatgaatgagtgccaagcaaactgaggctcagacacacctgaccttcctccttcctctctctggctctcacagtgacactctgcgagggacccaacaagttcaagtgtcacagcggcgaatgcatcaccctggacaaagtctgcaacatggctagagactgccgggactggtcagatgaacccatcaaagagtgcggtgagtctcggtgcaggcggcttgcagagtttgtggggagccaggaaagggactgagacatgagtgctgtagggttttgggaactccactctgcccaccctgtgcaaagggctccttttttcattttgagacagtctcgcacggtcgcccaggctggagcgcaatggcgcgatctcggctcactgcaacctctgcctcccaggttcaagtgattctcctgcctcagcctcctgagtagctgggattacaggcgcccaccaccaagcccgggtaattttttgtatgtttagtagagatggggtttcactatgttggccaggctggtgttgaactcctgacctcatgatccgcccacctcggcctcccaaagtgctgggattacaggcgtgacccaccccatgaaaaaaaattaaaaaatgaagcgatgctgggcgcggtggatcacgcctgtaatcccagcactttgggaagctgaggcaggcagatcacgagggcaggagattgagaccatcctggctaatacggtgaaaccccatctctactaaaactacaaaaaattagccgggtgtggtggcaggcacctgtgatcccagctactcaggaggctgaggcaggagaatcgcttgaacccaggaggtggaggttgcagtgagccgggatcacaccattgcactccagcctgggtgacagagtgagactctgtctcaaaaaaaaaaaaaaaaaaaaaagcgaattctgaaatacatgaattcttttccttagatgcctgcttctgtcttgaggtttgttgttgttatttcgaaacagagtcttgctctgtcgctcaggctggagtgcagtggcatgatcttggctcaccacaacctccggctcccaggttcaagcgattcttctgcctcagcctcctgagtagctgggattacagctgaatgccaccttgctgggctaatttttgtatttttagtagagatggggtttcaccatgttggccaggctggcctcgaactcctgacctcgagtgatctgcccgcctcctgaagtgctgggattacaggcgtgagccacctcgtcctggtgagggtttttttttttccccaaccctctgtggtggatactgaaagaccatattaggataactgtacagtatagagaaggcagtggcaagttttctctgtcatataccagagtgggcttgggcatggtggcatactcctgtagtctcagctaatcaggaggctgaggaaggaggatcgcttgggcccaggagttggagactgtagtgagctgtgatcacaccaccacacttcaatctgggcaacagagcaagagaccctatctctaaaaaaaagtaagtatttcggacactgtgggccatacggtctctggtgcagtttctcaacatggctgttgggtgaacacaaccacgcacagaacgcaaaccaatacacgtggctgtgggcccagaaaatgttatttatggacacaaaaattggaatttcatataactgttttgtgtcatgaaaatgatttccctttttatttttatttttcttctcaagtatttaaatatgtaaaagccatttttaggcctggcaggatggttcacagctgtaatcccagcactttgggaggtcgaggcgggaggatcacgaggtcaggagatcgagaccatcctggccaacacagtgaaaccccgtctctactaaaaatacaaaaaattaaccaggcttggtggcgcgcgtctgtagtcccagctgctcaggaggctgaggcaggagaatcgcttgaatgcaggaggcggaggttgtagtgagccgaggttgcaccactgcactccagcctgagcgacagagtgagagtccgcctcaaacaaaaaaatgtttgcccatgctggtcttgaactcctgggctcaagctatctgcctgccttggtctcccaaagttctgggattacaggcatgagctacagcgcccggacttttgttgttttatatctatatatctatatataacttgttttatgtatatatataacttgttttatatatatacataaactgcagtaaaaaacatgtaacataaaatttaccttctcaaaccttattaagtgcacagttctgtgccattagcaaattcacactgttgtacaacatcacaaccaccatctccagaacttttttttttttttttattctttttgagacagagtctcactcgtcgcacgggctggagtgcagtggtgcgatctcggttcactgcaacctccacctaccaggttcaagcaattctcctgcctcagccccctcagtagctgggattacaggtgcccgtcctaccacgcccagctaatttttgtattttcagtagagactgactgggtttcaccatgttggccaggctggtctcgaactcctgacctcaagtgatcctcccacctcagcctcccaaagtgctgggaatacaggcatgagccactgcgcccggccccagaactcttttatcttcccaaactgaagctctgtccccatgaaacactcactctccatcccctccccaactcctggcacccaccattctactttctgtccctatgaatgtgatggctctagggacctcctctgagtggaatcagacagcattttccttttttgactggcttatttcactgagccaagtgcggtggcacacgcctgtaatcccaaaactttgggagaccgaggcgggcgcatcacctgaggtcaggagttcgagaccagcccggccaacatggtgaaaccccatctctagtaaaaatacaaaaaattagcctgtcatggtcgtgggtgcctgtaatcccagctaagtgggaggctgaggcaggagaatcgcttgtacccaggaggcggaggtcgcagtgagccgagatcgtgccattacactccagcctgggcaacaagagtgaaactccgtctctcctaaaaatacaaaaaaattagctgggcatggtggcacatgcctgtagtcccagctacttgggaggctgaggcaggagaatcacttgaacccgggaggtggaggttgtaatgagccaaggttggcggcgaagggatgggtaggggcccgagagtgaccagtctgcatcccctggccctgcgcagggaccaacgaatgcttggacaacaacggcggctgttcccacgtctgcaatgaccttaagatcggctacgagtgcctgtgccccgacggcttccagctggtggcccagcgaagatgcgaaggtgattcccgggtgggactgagccctgggccccctctgcgcttcctgacatggcaaccaaacccctcatgcctcagtttccccatctgttaagtgtgcttgaaagcagttaggagggtttcatgagattccacctgcatggaaaactatcattggctggccagagtttcttgcctctggggattagtaattaagaaatttcaggccgggtgcgtaatccctgtaatcccaacaccttgggacgccgaggcgggcagatcacctgaggtcgggagttccagaccagcctgaccaacatggagaaaccccgtctctactaaaaatacaaaattagccgggcttggtggtgcatgcctataatcccagctactcaggaggctgaggcaggagaatcacttgaacctgggaggtggaggttgtggtgagccaagatcgtgccattgcactccagcctgggcaacaagagtgaaactccatccaaaaaaaaaagaaaagaaaagaaaaaaaagaaaagaaatttcagctgacacagcttcacactcttggttgggttcccgtggtgaatgatgaggtcaggtgatgactggggatgacacctggctgtttccttgattacatctcccgagaggctgggctgtctcctggctgccttcgaaggtgtgggttttggcctgggccccatcgctccgtctctagccattggggaagagcctccccaccaagcctctttctctctcttccagatatcgatgagtgtcaggatcccgacacctgcagccagctctgcgtgaacctggagggtggctacaagtgccagtgtgaggaaggcttccagctggacccccacacgaaggcctgcaaggctgtgggtgagcacgggaaggcggcgggtgggggcggcctcaccccttgcaggcagcagtggtgggggagtttcatcctctgaactttgcacagactcatatcccctgaccgggaggctgtttgctcctgagggctctggcaggggagtctgccgccctgttaggacttgggcttgccagggggatgcctgcatatgtcctagtttttgggaatatccagttaacggaaccctcagccctactggtggaacaggaaccggctttcctttcagggacaacctggggagtgacttcaaggggttaaagaaaaaaaattagctgggcatggtgccacacacctgtggtcccagctactcagaaggctgaggcgggaggattgcttgagggcaggaggattggttgatcctcccacctcagcctccggagtagctgggacctcaggtgcatgccactatgcctggctaattttcttttttctttttttttttttttcgagacggagtctcgctctgttgcccaggctggagtgcagtggcaggatctcggctcactgcaagctccgcctcccgggttcacgccattctcctgcctcagcctccccagtagctgggactacaggagcccgccactgcaccaggccaatttttttgtatttttagtagagacggggtttcactgtgttagccaggatggtctcgatctcctgacttcgtgatccgcccacctcggccttccaaagtgctcggattacaggcgtgagccactgcgcccagccgctaattttcatatttttagtaaaaacagggtttcaccatgttggccaggctagtcttgaactcctgaacccaagtgatcctcctgccttggcctcccaaagtgctgggattacagacaccacacctggctattattattttttagagacagggtgctgctctatcttccagcctgtagtgcagtgcagcctccatcatagctcgctgcagccttgacctcctgggttcacgtgatcgtcccgcctaagcctctggaggagctgggagtactggcatgtgccaccatgcctggttaatttttttttttttttttttgagacagagtctcattctgtcacccaggctggagtgcggtggtgcgatcttggcttactgaaacctccacctcccaggttccagcaattctcctgcctcacccttctgagtagctgggattacaggttccggctaccaaacctggctagtttttgtatgtttagtagagacagggtttcaccatgttggtgaggctggtctcgattctcccgcctcagcctcccaaagtgctgggattacaggcttgagccaccgtgcctggcttttttttttttttttttttttgtggcaataaggtctcattgtcttgcccaggctagccttatgctcctagcctcaagtgatcctcctccctcagcctcccaaagtgctgggattacaggtgggcgccactgtgcctgttcccgttgggaggtcttttccaccctctttttctgggtgcctcctctggctcagccgcaccctgcaggatgacacaaggggatggggaggcactcttggttccatcgacgggtcccctctgaccccctgacctcgctccccggacccccaggctccatcgcctacctcttcttcaccaaccggcacgaggtcaggaagatgacgctggaccggagcgagtacaccagcctcatccccaacctgaggaacgtggtcgctctggacacggaggtggccagcaatagaatctactggtctgacctgtcccagagaatgatctgcaggtgagcgtcgcccctgcctgcagccttggcccgcaggtgagatgagggctcctggcgctgatgcccttctctcctcctgcctcagcacccagcttgacagagcccacggcgtctcttcctatgacaccgtcatcagcagagacatccaggcccccgacgggctggctgtggactggatccacagcaacatctactggaccgactctgtcctgggcactgtctctgttgcggataccaagggcgtgaagaggaaaacgttattcagggagaacggctccaagccaagggccatcgtggtggatcctgttcatgggtgcgtatccacgacgctgagggctgcagagggaatggagggagcaggaaggagcttcaggaactggttagtgggctgggcatggtggctcaaagcacctgtaatcccagcactttgggaggccaaggtgggtggatcatcaagaccagcctgaccaacatggtgaaacctcgtctctactaaaaatacaaaaattagccgggtgtggtggtgggcacctgtaatcccagctgctcgggaggctgaggcaggagaatcacttgaacctgggagatggaggttgcagtgagccaagacagccccactgcactccagcctgggtgacagagtgagactccgtctcaaaaaaaaaaaaaaaaactaaacaaaaaactggttagtggctagacaacaggatggtatcttccaagcccatggctgactcagcagctcctgggtcaagacactgtgacctgtgtcccctggcaggaagcatcgcccctgccacctgcccggtgtactctgtacctgtcaggtgacatctgctacctaagcacgtgagaggtggcatttcacagtttcagtgtggtgctgacaacccgggacgcacactgtccttgcagctacaatcaggaggtgaatgttgggtttccagcagagaacactggagaaggcacacttggtgtctggaagggaaaagcagggaagagagcatcatcagatgcctgcgggtgaaggtgggcccgctatggccagcgtccctttttatttttatttatttatttatttgagatggaatctcgctctgtcgcccagactgtagtgcagtggtgcgatcacggctcactgcaagctccgcctcacaggttcacgccattctcctgcctcagcctcccgagtagctgggactacaggcacccgccaccacgcccggttaattttttgcatttttattagagacggggtttcaccgcgttagccaggatggtctaaatctcctgaccctgtgatccacccgcctcggcctccctaagtgcttggattacaagcgtgagccaccacgcccggccccctttttattttttattttttgagacggagtctcgctctgtcgcccaggctagattgcagtggcgtgatctcggctcactgcagcctccgcctcccaggttcaagtgattctcctgcctcaacctcccaactaattaggattacaagcatgtaccaccatgcctgactaattttttgtatttttagtagagactgggtttcaccatgttggctaggctggtctcgaacccttagcctcaagtaatctgcctgcctcagcctcccaaacagcggggattacaggcatgagccactgtgcccaacccaaccctggatctcttttaaacaagacaatgctcgctgttgccacagaacaatgggtggggtacatgtggcccagtgtgtttggccacataactgccaggccagagggaaagagactctcagactgtctccactcagatacaaatgtgtgtgttgtgtgcgtgtgttctggtctcatatttgtttgttttgagacagggtgtcgctctgtcactgagtctggagtgcagtggcgcaatcagagttcactgcagcctcaaactcttgggctcagttgattctcccacttcagcctcccaagtagctggaactacaggtgaacaccactgtgcccagctaatttattttatttttagtagagatgaggtctcactatgttgcccaggctggtcttgacctcctagcctcaagcaatcctcctgccttggtctcccaaagtgctgggattacacgtgcgagccattgcgcatggcttgtgttcttgtgtttcttcctttttctttcgagatggcgtctcagtctgccacccaggctggagtgcagtggtgtgatcatagctcactgtagcctcaacttcctgggctcaagcaatcctcttgatttcagcctcccgggcctggccagcatggtgaaaccccgtctctactaaaaatacaaaaatgtagccaggcgtggtggtgggcgcctgtaatcccagctacaccagaggctgaggcaggagaatcgcttgagcctggaaggtggaggttgcagcaagccaagatcgtgccactgcactccagcctgggcaacagagacagactctgtctcaaaaaaaaaaaaaaaaaacccaaacaagccacatttggagtttggggttcccagcaggactatttcccaagcctgagcctggctgtttcttccagaattcgttgcacgcattggctgggatcctcccccgccctccagcctcacagctattctctgtcctcccaccagcttcatgtactggactgactggggaactcccgccaagatcaagaaagggggcctgaatggtgtggacatctactcgctggtgactgaaaacattcagtggcccaatggcatcaccctaggtatgttcgcaggacagccgtcccagccagggccgggcacaggctggaggacagacgggggttgccaggtggctctgggacaagcccaagctgctccctgaaggtttccctctttcttttctttgttttttctttttttgagatgaggtcttggtctgtcacccaggctggagtgcactggcgcaatcgtagctcactgcagcctccacctcccaggctcaagtgatcctcctgcctcaccctcctgagtagctgagattacagacacgtgccaccacggcagactaattttattttatttttgggaagagacaaagtcttgttatgttggcctggctggtctcaaactcagggtgcaagcgatcctcccgcctcagccttccaaactgctgggattacaggcgtgggccaccgtacccagcctccttgaagtttttctgacctgcaactcccctacctgcccattggagagggcgtcacaggggaggggttcaggctcacatgtggttggagctgcctctccaggtgcttttctgctaggtccctggcagggggtcttcctgcccggagcagcgtggccaggccctcaggaccctctgggactggcatcagcacgtgacctctccttatccacttgtgtgtctagatctcctcagtggccgcctctactgggttgactccaaacttcactccatctcaagcatcgatgtcaacgggggcaaccggaagaccatcttggaggatgaaaagaggctggcccaccccttctccttggccgtctttgaggtgtggcttacgtacgagatgcaagcacttaggtggcggatagacacagactatagatcactcaagccaagatgaacgcagaaaactggttgtgactaggaggaggtcttagacctgagttatttctattttcttctttctttttttttttttttttgagacagagttttgctctcgtttcccaggctggagggcaatggcatgatctcggctcaccgcaacctccacctcccaggttcaagtgattctcctgtctcaggctccccagtagctgggattacaggcatgcaccaccaccatgcccggctaattttgtatttttagtagagacggagtttctccatgttggtcaggctggtctcgaactcccgacctcaggtgatctgcctgcctcggcctcccaaagtgctgggattacagacttgagccaccgcgcccagctatttctgttttctttctttcttcttcttctttttttttttctaagagacaggatctcactctgtccccaggcaggagtgcagtgctgtgatcatagctcactgcagccttaacctcctgggctcaagtgatcttcccacctcagcctcccaagtagctggaactacaggtgcacaccaccatgcccagctcatttttgtattttttttttttttgagacagtctcgttctgtcaccccggctggagtgcagtggtacaatcttggctcactgcaacctctgcctcccaggttcaagcgattctcctgcctcagcctcctgagtagttgagattacaggcatgtgtgccatcatacctggctgatttttgtatttttttttagagatggggtctcagtatgttgaccaggcttgtcttaaactcccggcctcaagtgatcctcccacttcagtctcccaaagtgctgggattacaggcatgagccactgcggccggtttgttttcttttttttttcgttttttggagacggaatttcacctttgttgcccaggatggagtgcaatggcacgatatcgcctcaccacaacctctgcctcctgggttcaaaccattttcctgcctcagccttcttagtagctgggattacaagcatgtgccaccacgcccggctgattttgtatttttagtagagatggggtttctccatgttggccaggctggtctcgaactcctgacctcaggtcattcgcccacctctgcctcccaaagtgctgggattacaggcgtgagccaccgtgcccggtggtttgtattctttttactgagagtcgtgaaaggcagtgatcctctgtcacatgtgatcttggctctcaggggacatttggcaatttctagagattttttggttgtcacaagtcaatggggaagactgttggcatttagtgggtagaggctggtgacgctgctgaacacccagaacagggaagtagcaggccctagatagagccatcgtggggaaaccctgctctaaggaaatggcgctattttataaccccacgttcctggcatgattaccaacagccaaaagtggagtccccccaagtgtgttcgtccatttgcattgcagtaaaggaatagctgaggccgggtaatttataaagaaaagagatttaaactgggtatggcagtttatgcctataatcccagaactttgggaggctgaggcaggaggatcgcttgagtccaggagtgtgagaccgagaccagcctggccaacatgacgaaactctgtctctacaaaaaatacaaaaagtaggccaggcacggtggttcacgcctgtaatcccagcactttgggaggccgaggcgggcggatcacgaggtcaggagatcgagaccatcctggctaacacggtgaaaccccgtctctactaaaaatacaaaaacaaaattagccgggtgtggtggcaggcgcctgtagtcccagctactcgggaggctgaggcgggagaatggcgtgaacccgggaggcggagcttgcagtgagccaagatcgcgccactgcactccagcctgggtgaccgagttgagactccgtctcaaaaaaaaaaaaaaaaaaaaaaatacaaaaagtagccaggtgtggtggcaggcacctgtaatcctgggttctcgagaccgaggcatgagaattgcctgaccccaggaggtggaggctgcagtgagccaagatcatgccactgcactccagcctgggcgacagagtgggactctgtctcaaaaaacaacaaaaaaaaagttctggaaatggatggtggtgatggtgatacttccacaacagcgtgaatctgcttaaggccaccgaactgtgcactcacaaatagtcgagatggtacattttatgttatgtgtatttcaccacaattaaaaactagttgtgggccaggtgtggtggttcatgcctgtaatcccagcactttgggaggtcagagggaggtggatcatgaggtcagcagttcgagaccagccaggccaacatggtgaaaccccatctctactaaaaatacaaaaattagccaggcgtggtggcacatgcctgtagtcccagctacttgagaggctgaagcaggagaatcgcttgaacctgggaggctaagattgcagtgagccgagatcgtgccactgcactccagcctggacgacagagtgagacttcgtctcaaaaaaaaaaccaaaaaaaaaattagctgtgggtcaggcactgtggctcacgcctgtaatcccagcactttgggagaccgaggtaggtggatggcctgaggtcaggagttcgaatccagcctggccaacatggtgaaagcccgtctctactaaaaatacaaaaaattagtcaggtatgttggcacacctgtaatcccagctactcgggaggctgaagcaagagaatcgtttgaacccaggaggtggacgttgcagtgagccgagattgggccactgtactccagcctgggcaacaaaagtgaaactctgtctgaaacaaacaaacaaacaaacaaacagacaaacaaaaaaactagttgtggagagagggtggcctgtgtctcatcccagtgtttaacgggatttgtcatcttccttgctgcctgtttaggacaaagtattttggacagatatcatcaacgaagccattttcagtgccaaccgcctcacaggttccgatgtcaacttgttggctgaaaacctactgtccccagaggatatggttctcttccacaacctcacccagccaagaggtaagggtgggtcagccccacccccccaaccttgaaacctccttgtggaaactctggaatgttctggaaatttctggaatcttctggtatagctgatgatctcgttcctgccctgactccgcttcttctgccccaggagtgaactggtgtgagaggaccaccctgagcaatggcggctgccagtatctgtgcctccctgccccgcagatcaacccccactcgcccaagtttacctgcgcctgcccggacggcatgctgctggccagggacatgaggagctgcctcacaggtgtggcacacgccttgtttctgcgtcctgtgtcctccaactgccccctcctgagcctctctctgctcatctgtcaaatgggtacctcaaggtcgttgtaaggactcatgagtcgggataaccatacttttcttggatggacacatcagcaccgggcttgacatttacccagttcccctttgatgcctggtttcctctttcccggccccctgaagaggtgatctgatttctgacaggagccctgagggaggaaatggtcccctttgttgacttttctttttctttatttttttcttttgagatttgctgtcacccagcctggaatgcagtggtgccatcttggctcactgctacctctcccactgggttcaagcaattctcctgcctcagcctcccaagtagctgggattacaagcatgcgccaccatgcctggctaagttttgtatttttagtacagacagggtttctccatggtggccaggctggtcttgaactcctgacctcaggtgatcctcccacctctgcctcccgaagtgctacgattacaggcatgagccaccgcgcccatccccctttgttgacttttctcatcctctgagaaagtctcagttgaggccagcacctccctcaagtgaattgaatctcccttttgaacaacaacaaataacaatatgacccagacgtggtggctcacacctgtggtcccagctactcgggaggctgaggtgtgaggattgcttgagcccaggaggtcaaggctacagagagctataatcacaccacttcactccagcctgggggacaaagtgaaaccctgtctgaaaaaaacaaaaaaagaaaaaggaaaaagaaacaatacgatcacaaagtagatattcatagtgtttattttcagtactcttttttttttttttttttttttttgagacggagtcttgctctgttgcccaggctggagtgcagtggcacgatcttggctcactgcagcctctgcctcccaggttcaagcgcttggctcactgcaacctccgcctcctgggttcaagcgcttcttctgcctcagcctccccagtagctgggactataggcacgtcccactacgcccagctaattttttgtattttttagtagagatggggtttcactatgttagccaggatggtctcgatctcctgacctcgtgatctgcctgccttgggctcccaaagtgttgggattatgggcatgagccactgcacctggccttttttttttttttttttgagatggagtttcgctcttgttgcccaggctggagtgcaatggtgtgatctcggctcactgcaacctctgcctcctgggttcaagcaattctcctgcctcagcctcccgagtagctgggattacaggcacctgccaccacgcctggctaatttttgtacttttagtagagacggggtttctccatgttggtcaggctggtctcaaactcctgacctcaggtgatccacccacctcggcctcccaaagttctgggattacagacatgagccaccgcgcctggccgtgtctggccttttttagttatttcttttttttttttttttttttttgagacagagtcttactccgtcgcccaggctggagtgcagcggtgcgatgtctgcgcactgcaagctccgccccctgggttcatgccattctcctgcctcagccttctgagtagctgggactgcaggcgcctgccactacgcccggctacttttttgtatatttagtagagatggagtttcactgtgttagccaggatggtctcgatctcctgactttgtgatccgcccgcctcggcctcccaaagtgctgggattacaggcgtgagccaccatgccaggcttttttttttttttttttttttgagacggagtcttgctctgtcgcccaggctggagtgcagtgccatgatctcagctcactgcaagctccacttcccaggctcacgccattctccagcctcagcctcccaagtagctgagactacaggggcccgccaccacactcggctaatttttttgtatttttagtagagacggggtttcaccatgttagccaggctggtcttgaactcctaacctcaggcgattcacctgcctcggcctcccaaagtgctgggattaaaggtatgagccacctcgcctggtgtgagccacctcgcccagcctgagccacctcacccagcctaagccactgtgcctggcctgattttggactttttaaaaattttattaataattatttttgggtttcttttttttgagacagggtcttactctgtcatccaggccatcctgtctgtctgtcatcccagtgatgggatcataccttgctgcagcctctacctcctgggctcaagcgatcctcccccctcagcctcctgagtagctgggagtacaggtgtgcaccaccacacctggctaatttttttttttttttttgtatatagagatggtattttgccatgttgaccaggctagtcttaaactcctggactcactcaagagatcctcctgccttggcctcccaaggtcatttgagactttcgtcattaggcgcacacctatgagaagggcctgcaggcacgtggcactcagaagacgtttatttattctttcagaggctgaggctgcagtggccacccaggagacatccaccgtcaggctaaaggtcagctccacagccgtaaggacacagcacacaaccacccgacctgttcccgacacctcccggctgcctggggccacccctgggctcaccacggtggagatagtgacaatgtctcaccaaggtaaagactgggccctccctaggcccctcttcacccagagacgggtcccttcagtggccacgaacattttggtcacgagatggagtccaggtgtcgtcctcactcccttgctgaccttctctcacttgggccgtgtgtctctgggccctcagtttccctatctgtaaagtgggtctaataacagttcttgccctctttgcaaggattaaatgggccaaatcatatgaggggccaggtccttcaggctcctggttcccaaagtcagccacgcaccgtgtgggtcccaaaattttatcaaggcacattcgttgcctcagcttcaggcatctgcccaaaaaggccaggactaaggcaaggagagggagggattcctcagtactcagcttttcacagaggctccaaaaggctaaggaatccagtaacgttttaacacaattttacaatttttttttttgagacggagttttgctcttgttgcccaggctggagtgcagtggcacgatctcggctcactgcaacctctggctcccgggttcaagcgattctcctgcctcagtctcccgagtagctgggattacaggcatgcgccaccacgctcggctaattttgtatttttagtacagaaggggcttctctgttggtcaggctggtcgtgaactctcaacctcaggtgagccacccgcctgagcctcccaaagtgctgggattacaggtgtgagccaccacgcctggccttttttttgagacagagtctcgctctcgcccatgctgtactgcagtgacgcagtctgggctcactgtaacctccgcttcccaggttcaagtgattcttctgccgcagcctcccatgtagagtagctgggattacaggcacccgccaccatgcctggctaattcttgcatttttagtagagatggggtttcacagtgttggccaggctggtctcaaacttctgacctcaagtcatctgcctgccttggccctgccaaagtgctgggattatagatgtgagccaccgcgcctggcctacagtttattctttggtggctcacacctgtaatctcagcactttgggaggccaaggtgggagaatggcttgagcccaggagttcaagtccagcctgggcaacatagcaagaccctatctctactacaaaataaataataaataaactaattttttttcttttaaaacccaactattcaacatggcaatgcaatatattaaaaaaattttttttttctttgaaacggagtctctcactgtcacccgggctggagtgcagtgtcgccatcttggctcactgcaacctccgcctcccaggtccaagtgattctcctgcttcagcctcccgagtagctgggattacaggcacccaccaccatacccagctaatatttttgtatttttagtagagatggggtttcactatgttgggcaggctggtctggaactcctgacctcgtgatctgcccgaggatcggcggcctcccaaagtgctggggattgcaggcatgagccaccgtgcccagccaaaacttttttatttttatttttttgggacacggtctcactgtgtaccccagactggagtgatagagtgctgtcatggctcactgcagcctcaacctccctgggctcaggtgatcttcctgcttcagtctcccaggtagctgggactacaggcatgagccaccacacccagctaatttttgaatttttttgtagagacagggtttcaccttgtggcccagacttgtctctaactccagggctcaagcgatctgcccaccttggcctcccaaagtgctgagattaatgcaatttaaaaaattttttggccaggcctggtggctcatgcctgtattcacaacaccttgggaggcaaaggtgggcagatcacttgaggtcaggagttcgagactagcctggccaacatggtgaaaccccctgtctactaaaaaaatacaaaaattacctgggcacagtggtgggtgcctgtaatcccagctacttgggatgctgagggtggagaattgcttgaacctgggaggcagaagttgcagtaagccaagatcatgccactggactccagcctcagtgacagagcaaaactctgtctccaaaaaaattgttttttttttttttttttcaaatcatcacactacagccaaggcctggccacttacttttgtaaataaagttttattggagccagtggaccagtgaggccgaatcttgcaggtgtaagatcacagtctatccttgaaaattttgatattttgttcattgggtggtttttcattaatttaaattttaaaaaataacatattaaaggctggtgtggaggtgcacgcctgcagtcctagctactcccagaggctgaggcgggagacttgcttgagcccaagagttgaagtccagcctgggcaacatagcgagacccccatctctaaaaataaaaataatgcattagaatattattggattcctgggcagggcacagtggctcacacctgtaatcccagcactttgggaggctgaggtgggtggatcacctgaggtcaggagtttgagaccagcctggccaacatggtgaaaccccgtctctactaaaaatacaaaaattagccaggcgtggtggcaggtgcctgtaatcccagctactcgggaggctgaagcacgagaatcgcttgaatccaggaggcggaggttgcagtgagctgagattgcgccattgcactccagcctggaggacaagagtgaaactccattcccctctgcaaagaaaaggaatattatcagattcctaagctttttggctccccctttagtttgggggctggggtggtgagtgtctgacctggcctcactgtcctccctggatgtgatgagacccaggtgtgggtcaggatgtcattcgtttgtccaccagagggcgcccaaactgctttgagctgctgggaaatggtgctcctagacttttagcaaacaaacaaaaaaaaatggcacatcggcaaatttcagaccattctttttttttttttttttggttccagagtagctgaaatctttgttcagttacaagcaggataaaatggaaactgcctgggagaggctgagaaaccttcttgcttgggggaggtggggcactgctagaattaatcgcttcacagaccagcccatccaggactcctcaaatttggcaaaaaagccattcattcattcattcatttatgtagagacgagggggatctggctatattgcctagattggtctcaaattcctggcctcaagtgatcctcctgccttggtctactaatgtgctgcgattacaggcatgagccaccgtgcctagctctagtggacttgaaatgttgccttgcccagggcccttatgttgaatggcccaggtccacttgtatggttctgtaccaaggttaaccccatcccataatgcctgggacagttgatgcaggacaatcagcttctgtgccattcaacctcaggactgagcatgctgggcattgtggggtccgaaggtggctcccctgtccccttcaaaataccctctttttcttttcttcttttttttttttttttttttttgagacgaagtcttgctctgttgccccagctagagtgcagtggtgcgatctcagctccccgcaacctctgcttcccgggttcaggcgattctcctgcctcagcctcctgagtagctgggattacaggtgcccaccgccacagctggctaatttttgtatttttagtagagacagggtttcaccgtgttggccaggctggtcttgaactcctgacctcaggcaacctgcccacctcagcctcccaaagtgctgggattacaggtttgagccactgggcctggccttttttttttttttttgagagggagtctcactctgttgcccaggctggagtgcaatggcgcgatcttgactcactgcaactccatttcccgggttcaagtgattctcctccctcagcctcccaagtagctgggattacaggtgcatgccaccacggccagctaattttgtatttttagtagagacagggtttcactatgttgatcatgctggtctcaaactcctgaccttaggtgatctgcccgccttagcctcccaaagtgttgggattacaggtgtgagccaccgcgcccagaccaaaatatgctcattttaataaaatgcacaagtaggttgacaagaatttcacctgcaaccttgtcaaccacctagaataaaagcctctgcagccctcccctaaagactcatcaatgtgaggctcaagaaccttcttaggctgggctcggtggctcatttctgtaatccctgcactttggaaggctgaggcaggaggatctcttgaggccaggagttcaagacaagcctgggcaacatagccagacctctgtttctatcccccacaaaaagaaccttcttaaaccggaattgagtcctacaacctcgataactcacaaataagcccgtgtggcctctcacagacttgggaagttctccaagtgtccagggagatgtgccaggcgctttcctgccgtgaccaccgtcctctgcctgctccatttcttggtggccttcctttagacctgggcctcactcttgcttctctcctgcagctctgggcgacgttgctggcagaggaaatgagaagaagcccagtagcgtgagggctctgtccattgtcctccccatcggtaagcgcgggccggtcccccagcgtcccccaggtcacagcctcccgctatgtgacctcgtgcctggctggttgggcctgttcactttttctcctggacagggaacagccccactggtgtcctttatcacccccacggcctctcctggcttggggctgacagtgacaagatcagacagctaaggggtcagatggaggatgtggagctgggtcccgtgctgtggaatagcctcaccgagatttgagtgccttctggggaactggttcccttgcagggggctgtgtggagaggcgcgctctccctgcctcacccatgctcatcctaactcggttaccatcacatctcttttttctttttttcttaaattttaagaaaaaagaaatttaatttttttgagagacagagtcttgctctgtcacccaggctggagtgcagtggcaccatcatgcctcgctgcagcctcaatgtctgggctcaagcgatcctcccacctcagcctcctgagtagctggtgcaagccactataccccacttcctatttcttaaaaagtcacagccctgtgtgtggctaatcctggacagaaatctagaagaagtcagctacttctggggcgtggctcacccagtgggcttcaggttagatatttcttatacttatgaggctgggtgtggtggcttatgcctgtaatcccagcactttgggaggctgaagtgggtggattgcttgggctcaggagttcgagaccaacctgggcaacatggcgaaaccctgtttctagaaaaggtacaaaaattagctgggcaggtggcacgtgcctgtggtaccagctacttgagggcctgaggcaggaggatcgcttgaacctgggaggtcgaggttgcagtgaactgagatcatgtcactgcactccagcctggtgacagagcaagaccccgtctcaaaaaaaaaaaaagaaagaaaaaaattcttatgcatagatttgcctcttttctgtttgtttgttttgagatggagtctcgctctgtcgcccaggctggagtacagtggctcaacctcggctcactgcaacctctgcctcccgggttcaagcaattctcctgcctcagcctcctgagtagctgggactacaggcgcccgccaccatgcccagctaatttttgtatttttagtagagactgactgggtttcatcatgttggccaggctggtctcgaactcttgacctcatgatccgcccgcctcagcctcccaaaatgctgggattacaggcgtgagccaccaggcccaggccgcaaggcgatctctaaacaaacataaaagaccaggagtcaaggttatggtacgatgcccgtgttttcactccagccacggagctgggtctctggtctcgggggcagctgtgtgacagagcgtgcctctccctacagtgctcctcgtcttcctttgcctgggggtcttccttctatggaagaactggcggcttaagaacatcaacagcatcaactttgacaaccccgtctatcagaagaccacagaggatgaggtccacatttgccacaaccaggacggctacagctacccctcggtgagtgaccctctctagaaagccagagcccatggcggccccctcccagctggaggcatatgatcctcaagggaccaggccgaggcttccccagccctccagatcgaggacagcattaggtgaatgcttctgtgcgctcattcagaatgtcagcggacaatggccttggtggtgtagaggaatgttggataagcaaatagagagctccatcagatggtgacagggcaaagaaagtcaaaaggagttcagaggccgggcgcggtggctcatgcctgtaatcccaggactttgggaggccgaggctggcggatcacctgaagtcaggagtttgagaccagcttggccatcatgacaaaaccccgtctctattaaaaatacaaaaaattagccaggcgtgggagtgggcgcctgtaatcccagctactcgggaggccgaggtagaaaaatcgcttgaacctaggaggcagaggttgcagtgagccgagatcgcgccactgcattccagcccgggaggcaagagcaaaactccatctcaaaaaaaaaaaaaaaaggagttcagaggcccggcatggtggttcacacatgtgatcccagaacttggggaggttgaggcaggagaatcacctgagctcagagttcaagaccagcctgggcagcacagcaagaccccatctctgcaaaaaataaaaatttagcccagtgtggtgatgagcgcctagttccagctactagggaggctaaggcaggaggattgcttgaggctaaggtaggagattgagactgcagtgacttgtgattgcgtcactgcgctccagcctgggtgacagagcaagcccttgtctcttaaaaaaaaaaaaaaattcaaagaagggtttccagagggccaggagggaggaagggagaggaggtgttttatttttttgcttttattttttattttgagacagagtctctctctgtcacccaggttggagtgcagtgctgtgatcttggctcactgcaacttctgcctcctgggttcaagcaattcttatgcctcagcctcagcctcctgagtagctgggattacaacactatgcccgggtaatttttgtatttttagtagagacgaggtttcgccatgttgcccagactggtctcgaactcctgacctcaagtgatccacccgccttggcctccccacgtgctgggattgcaggcgtgagccactgcgcccgccttgatctttacacaaggggtttagggtaggtagccttctctgaaccaggagaacagcctgtgcgaaggccctgaggctggaccgtgcctgttgggtttgaggccgttgtagctggagcaaacagagagaggggtaaaaaggcaggaggctaccaggcaggttgtgcagagccttgtgggccactggggaggactttggcttttgccctgagagcggtgggaagtgactgaatccggtactcaccgtctccctctggcggctcctgggggaacatgcttggggatcaggctgggggaggctgccaggcccaggaggtgagaagtaggtggcctccagccgtgtttcctgaatgctggactgatagtttccgctgtttaccatttgttggcagagacagatggtcagtctggaggatgacgtggcgtgaacatctgcctggagtcccgtccctgcccagaacccttcctgagacctcgccggccttgttttattcaaagacagagaagaccaaagcattgcctgccagagctttgttttatatatttattcatctgggaggcagaacaggcttcggacagtgcccatgcaatggcttgggttgggattttggtttcttcctttcctcgtgaaggataagagaaacaggcccggggggaccaggatgacacctccatttctctccaggaagttttgagtttctctccaccgtgacacaatcctcaaacatggaagatgaaaggggaggggatgtcaggcccagagaagcaagtggctttcaacacacaacagcagatggcaccaacgggaccccctggccctgcctcatccaccaatctctaagccaaacccctaaactcaggagtcaacgtgtttacctcttctatgcaagccttgctagacagccaggttagcctttgccctgtcacccccgaatcatgacccacccagtgtctttcgaggtgggtttgtaccttccttaagccaggaaagggattcatggcgtcggaaatgatctggctgaatccgtggtggcaccgagaccaaactcattcaccaaatgatgccacttcccagaggcagagcctgagtcactggtcacccttaatatttattaagtgcctgagacacccggttaccttggccgtgaggacacgtggcctgcacccaggtgtggctgtcaggacaccagcctggtgcccatcctcccgacccctacccacttccattcccgtggtctccttgcactttctcagttcagagttgtacactgtgtacatttggcatttgtgttattattttgcactgttttctgtcgtgtgtgttgggatgggatcccaggccagggaaagcccgtgtcaatgaatgccggggacagagaggggcaggttgaccgggacttcaaagccgtgatcgtgaatatcgagaactgccattgtcgtctttatgtccgcccacctagtgcttccacttctatgcaaatgcctccaagccattcacttccccaatcttgtcgttgatgggtatgtgtttaaaacatgcacggtgaggccgggcgcagtggctcacgcctgtaatcccagcactttgggaggccgaggcgggtggatcatgaggtcaggagatcgagaccatcctggctaacacgtgaaaccccgtctctactaaaaatacaaaaaattagccgggcgtggtggcgggcacctgtagtcccagctactcgggaggctgaggcaggagaatggtgtgaacccgggaagcggagcttgcagtgagccgagattgcgccactgcagtccgcagtctggcctgggcgacagagcgagactccgtctcaaaaaaaaaaaacaaaaaaaaaccatgcatggtgcatcagcagcccatggcctctggccaggcatggcgaggctgaggtgggaggatggtttgagctcaggcatttgaggctgtcgtgagctatgattatgccactgctttccagcctgggcaacatagtaagaccccatctcttaaaaaatgaatttggccagacacaggtgcctcacgcctgtaatcccagcactttgggaggctgagctggatcacttgagttcaggagttggagaccaggcctgagcaacaaagcgagatcccatctctacaaaaaccaaaaagttaaaaatcagctgggtacggtggcacgtgcctgtgatcccagctacttgggaggctgaggcaggaggatcgcctgagcccaggaggtggaggttgcagtgagccatgatcgagccactgcactccagcctgggcaacagatgaagaccctatttcagaaatacaactataaaaaaataaataaatcctccagtctggatcgtttgacgggacttcaggttctttctgaaatcgccgtgttactgttgcactgatgtccggagagacagtgacagcctccgtcagactcccgcgtgaagatgtcacaagggattggcaattgtccccagggacaaaacactgtgtcccccccagtgcagggaaccgtgataagcctttctggtttcggagcacgtaaatgcgtccctgtacagatagtggggattttttgttatgtttgcactttgtatattggttgaaactgttatcacttatatatatatatatacacacatatatataaaatctatttatttttgcaaaccctggttgctgtatttgttcagtgactattctcggggccctgtgtagggggttattgcctctgaaatgcctcttctttatgtacaaagattatttgcacgaactggactgtgtgcaacgctttttgggagaatgatgtccccgttgtatgtatgagtggcttctgggagatgggtgtcactttttaaaccactgtatagaaggtttttgtagcctgaatgtcttactgtgatcaattaaatttcttaaatgaaccaatttgtctaaactcgatgcacgttcttctgttcgcgcgcttctttttgtttttttttttttcctgagatggagcctggctctgtcacccctggctggagtgcagtggcatgatctcggcttactgcaagctccgcctcccaggttcaagcaattctcctgcctcagcctccctagtagctaggattacaggtgagtgccaccacgcctggccaattttttttttttttttttttttgagacagagtctcgctctgtcacccaggctggagtgcagtggtgtgatctcggctcactgcaagctctgcctcccaggttaatgccattctcctgtctcagcctcctgagtagctggggccacaggcgcctgccaccacgcccggctaatttttttttgtacttcttttagtacagacggggtttcaccatgttagccaggatggtctcgatctcctgaccttgtgatccacctgcttcggcctcccaaagtgctgagattacaggcgtgagccaccgcgggtggccaacgctaatttttttgtttttttagatggagtcttgctctgtcgcccaggctggagtgcagtggcgtgatctctgcctactgcaagctccgcctcccgggttcatgccattctcctgcctcagcctcctgagtaactgggactacaggcacccgccaccacgcccggctaattttttgtatttttagtagagacagggtttcaccgtgttagccaggatggtcttgatctcctgaccttgtgatccacccgtctcggcctcccaaagtgctgggattagaggtgtgagccaccacacctggcctagcctggctaatttttgtatttttggtagagacggggtttcaccatgttggtcaggctggtcttgaacttctgacctcaggtaatctgcctgcctcagtctcccaaagtgctgggattacaggtgtgagccaccgcgcctggcctcacttccttctgtcatctgtttgtggattggactccccaggagaaggacccagaaggggaagactcccagaactccgggcaagatgcaatctccgtgggctgccacagtgcctggcaggtgctgtgatggctgagctggtgattgtgttctctgctgtcgcttctctgagttggagattttgtcaagtcccctgctcatccattcatacactcgacaaatatctgttgagtgctaagtgcgaaccatgctctgccgtaggcttgtgggacactacaggggatataagaaatgaaagccgggtgtggtggctcacacctgtaatcctagcagtttgggaggccgaggcgggcagatcatgaggtcaggagatcgagaccatcctagctaacacagtgaaaccccatctctactaaaaatacaaaaaattagccaggcgtggtggtgggcgcctgtagtcccagctgcttgggaggctgaggcaggagaatagcgtgaacctgggagttggagcttgcagtgagccgagatcgcaccactgcactctagcctgggcaacagagcaagactccatctacaaaaaaaaaaaaaagaaatgaagtcttgatacggtggctcatgcctgtaatcccagcactttgggaggccaaggcaggcggatcacgagctcaggagatcgagaccatcctggccaacgtggcgaaacccagtctctactaaagatacaaaaaattagccaggcatggtggcgggcgcctgtagtcccagctacttgggaggctgaggcaggagaatggcatgaacccaggaggcagagcttgcagtgagctgagatcgcgccactgcactccagcctgggcgacagagcgagactctgtctcaaaaaaaaaacaaaaaagaaatgaaaatctccctgtctgtccttaaggacctgacatcattttattttatttatttttttgagacaaggtcttgctttattgcccaggctggagtgcagtggcacaatcttggctcactgcaacctccacctcccgggttcaagcgattctcctgcctcagcctcctgtgttgctgggatcacaggcgcgtacccggctaatttttatattttcagtagagatggggttttgccatgttggccaggctattcttgaactcttgacctcaagtcgtctaccgcctcggcctcccaaaatgctaggattacaggtgtgagccaccgcaccaagccaaatgttacttcattagagaaactccccctgaagaaaacttccttcctgccagttgcttttctgtccccatactctgtttaatattcttctagaatattcttctaaaatgtagcaattttttgtatctattctaaaaatggaggccaaggaaggcagatcacttgaggtcaggagtttgagactagcctggccaacatggtgaaaccatgtctctactaaaaagggtaagattttgaggctgcagtgagctatgacggcaccattgcactccaggctgggcaacagagcgagacaccatctcaataaaaaaaaaaaaaagcagggtgcggtggctcaagcctgtaatcccaacactttgggaggctgaggcaggcggatcatgaggtcaggagttcgagaccagcctgcccaacatagtgaaaccctgtctactaaaaatacaaaaaaattagccgggtatgctggcaggtgactgcaccataaaaaatgttcaagattaaacagggggacggtgaggtaacccagaaataagcaacagcagaaagcgccaccaccacaaaaccaggagaggaagatgtggtttctggagcctgggagctggtgagagccagaaactcataggagggaaagaagtgctgcagacatggtccccagcagagcgaggcggggaagagcccagcctgtcccccgctccaggctctatctcccaccagtgcctcccacgggctgagcccaacagggacaggctgatgaagcccaggcaatggtgccttactgggtggatcgaaggagggacagggttggcccaggggtgacacgacactggggtggttaggtccacaaacgtggctcatgcctgtaatcccagtaccttgggaagctgaggcaggaggattgcttgagcccaggagttcaagagcagtctgggcaacatagcaagaccccatctctaaaaaacgtttttaaatttctgggctcagtggctcatgcctataatcccagcactctgggaggccgaggcaggcggatcacctgaggtcaggagttcaaaaccagcctagccaaaatggcaaaaccccgcctctactaaaaatacaaaaattagttgggtgtggtggcgcatgcctgtaatcccagctacttgggaggctgaggcaggagaatcgcttgaactcgggaggccgaggttgcactgagccaagatcgcaccactgcactccagcctgacagagcgagacactgcgtcaaaaaaacagacaacaacaacagaaaaagttttaaaattaccagccggatgcgatggcgcacacctgtagtcccagatacttggaggctgaggtgggaagatctcttgagtccagcactttgggaggccaaggtgggcggatcacctgaggttgggggtttgagaccagcctgaccaacatggagaaaccccatctctactaaaaatacaaaattagctgggtgtggcggcgcatgcctgtaatcccagctacgcgggaggctgaggtaggagaattgcttgaacctgggaggaagaggttgcggtgagccgagattgcaccattgcactccagcctgggaaactctgtctcaaaaaaacaaaacaaaacacaacaaaaacccaaaaagagcagactgaccaggccgtctgggttcataacctggctctgccactgactcgctgggtgacaggcacctcagagcctcagtttccccacctgacaatggagacaaagctaatctccccctccccaggggctctggaagtggggcaggatggggctgcgcaggcgctcggagacaaaggcagggcctgtcatctttcctgcgtccacggggtggcacttccttcctgccttccgccttttgttttgggacgcttccaaaacgcccctgggagggaaaactgagcagcccacacaggaagcgtcctggagcctgcacacaggcgctcgataattgctcgattgacgaaattggtgctcaaccaagtggcaaacaggataagcgggctcagatggccaggaaaacgggagggcctgggaggtggcggctcgagggtgctgagactgagacgggagggtgggcaggaccggggtgcatccccaggcaggggtggggactgggagcacagcatgggtggggcatggcccagaggagaggccagaggtgatggaaggttctggtattcggccttggctgctgcattgggagcttgtatcagagctttgagggtgacacagacatgcagacattcagtttcctgacaatccatcgttctgccccgatggtcgccaaagggagggagggttgacagccacccattttacagagagaaataggaggctcgggtcactgtggctggattctgatcctcgccggttccagttctctggctcagaacggggccctggtaaaatgcgctgctggctccctggtctataggctcagcacccacccacccacccacttgtcctgcagggctgggggcagcctgcagcttggggaacgccacccctgcaggctggtggtcctgtcctgtctccgcaggctcaacagctctggccaggacagggtggaaggtgggaggaatttgtcccactcccagcaagtctgacacccacaactagtgtcccctgctgtccctccccttctcctgtccccaggccgttccccttccagcagcccgaggcatcccagaccacagctgtctgcagtgagtcagcctggagcctctgggctgagccgcggctgccagagggaggtggggagaggggtgcaggctgccctgccctgcagctggccctggcctaatcccctccccgctccccagtctggggtcagcaccctcctcccttgcaggcagtgattttccgtgatgatgaaggaataaaaaagccacggagggttctgagtgggagtccctggtccccatcaccccactgagcatggccgctggggtttcctggcaactttctgctccatccggagccgtccctcccctgggctgggctgctctggggctgttcctgggatggggagcggggagcttgggagtaaatagtgacatcagccacctagacaggcggggccactgtgtcaaggggccatgtcaggttcccttctcccagagctggggcttgtcttggaattggaaaatcctccccacattgccctgtggactgcaggcctggcgtgatcaaggacccctgccctcctgccatcccccttggtctcctccatgccagccttgctgtttcccctgcctggctcacagtctccacacctttatcccctgggggctcaagtctgggacaaatgacacctcctccctgggcctcccacagagccacagagcgtcaccccccaccaccccacagcgttcatttgtgggtcaggattaagagcacaagctctgaacacactcagctcagattaaagccctggctctgccacccgtctacagaaaaactgacacagtggcctccactggggtgtggctccatgaaggagggtctggcgggccacaggcttacagtactcatttctcttttcttttctttcttccttcatttcctttctctctctccttccttcctccctccctcccttccttccttctttcttcctttgtttctctctcttttttttttgagacggagtctcgctctgtcgcccaggctggagtgtagtggtgcgatctcagctcaaggcaaccaccacctcctgggttcaaacgattctcttagcctcctgagtagctgggattacaagcacgcaccaccacgcctggctagtttttgtgtgtttagtaaagatagggtttcaccatgttggctgagctggtcttgaactcctgacctcaagcaatctgccccacctcggcctccagaagcgttgggattacaggcgtgagccaccacaccggcttctcctctccctctcctctttctccttttccttcctttcttccttccttcccttccccttccttccttccttccttcattctttcttccccccgctcccccctctttttttttgagacagggtcttgctttgtcacccaggctggagcgcagtggtgcaatcctagctcactgcagccttgacctcccagggttgaggcaatcctcccacctcagcctcccaagtagccaggactacgagtgcacgccaccatgcctggctaattttttagtttttttttgtagagacaggagtctcactgtgttgtccaggctggtcttgaactcctcggttcaagcaatcttcctgccttggcctcctaaagtgctgggattacaggcgtgagccacagcacctggcccagtccacatttctaagtaaatatgggaggccagccaggtgcagtggctgtaatcccagcactttgggaggccgaggtgggtggatcacctgaggtcaggagttccagaccagtctggccaacatggtgaaatcccgtctttactaaaaatacaaaaattagccgggcgtggtggctcatgcctgtaatcccagcactttgggaggctgaggcggcagatcacaaggtcaggagatcgagaccatcctggctaatacggtgaaacccgtctctattaaaaatacaaaaaattagccgggcatggtggcaggagcctgtagtcccagctactcaggaggctgaggcaggagaatggtgtaaacccgggaggcagagcttgcagtgagccgagatggtgccactgcactccagcccaggtgagagtgtgagactccgtctcaaaaaaacaaaataaaacaaaaaatacaaaaattagcggggcgtgatggcaggtgcctgtagtcccagctacttaggaggctgagggaagagaatcacttgaacccgggaagcagaagttgcagtgagccgcgatcgcatcactgcactgcagcccgggtgacagagcaagactccatctcaaaaaaaaaaaaaaaaaaaagggaggccactggaggttgtggggccaccatgagagtcgacaagggtggcccacattcctagatgagttgcctggaggctgtagtcccagacctcaggggggtcccctccggaacccaaacactgtcatgccaatgacacaaaactggtcttcctggcctctcccatcctgtccagcctagaagggagactgagacttcagatccgacaaccatgggttcaaatccagccttgaaaacttcccatgcacaggcaagccccattgcgatctgtttcttttcttttcctttctttctttttttttttttttttttttttgagacagtcttgctctgtcacccaggctagagtgcagtggcgtgatctcggctcactgcaacctccgcctcacaggttcaagcgattctcctgcctcagcctcccaagtagctgggattacaggtgcccatcaccgtgcccagctaatttttgtatttttagtagagacgggagtttcaccatcttggccaggctggtctcgaactcctgacctcgtgatctgcttgcctcagcctgccaaagtgctgggattacaggggtgagccactgtgcccggctgcgatctgtttcttttaaccgtaaactgggaagaactttgaccacctcttagtccagaactatcagggaaggggcactgaatgccaggctggaggagggttgcatgaaaggcttgaccccagctactcaggaggctgaggcagaaggactgtttgacctgatgaattcgaggctgcagtgaggctgtgatcgcgccactgcactccagcctaggcaatagagtgagaccctgtctctaaaaaaaaaaaaaaaaaaatggctcagccatcccaagctgctcccagctgcctgcccctctaggtggcccccactactggcctgaggatgcactttatccccgccagggcctgaggagtcctggggaaaggtacccaagtctagtcctcaggagaagccgcccagggagcactagggcccgaggaagggttcaacctcgagactccatagcccctgggctcccgtccccagaaacaccagttacgagcagggggctggccatggtgtgaattcatgacctgcacacctcttgccgtaatgactaagtggctagagcttcaggctgccccactgctgccctctggagctcgagcaggtgcaggtgtgggtgcccaccctggcttggcctcttctcacctgggtggcttcggacacagggtggactcctcaaaggggctgcttcccatctgagaagccagcataatcctccaggggctactgatatacacacgctgcccctggtcctgagttagatcaccctgcccctagggagggcttgggggcttcactgctgaagttcagactccagggtggtccttgtcctgtgtgcctcagtttccccatctgtaaaatggatggtcctggggctgagcctcagtgctgcagggactagtgtggaaccctgtgtcctggtgcctgaaaccttactcccacctcagcagggctgggctgagccatcagcaagcctctggccggcctccatcattcaggaaagagccggtggctgaaggcacagctctcagagggagaacaaacgggggcgggggtgggatgggggcggggccggaggccaccggcctcaggctgtcctgggcatccagccagtgctgggcagtgagtcaggggccaggcatgtggagtggggcctctcccagccccggagatcaggcacctcccggaacccgcctgctgggcccccaccaggccgcgttcctctcccactcgctctccccatagaggggaccctggacctgcctgggggggacgaggatggggatgtggctggtgggcacagggcctctctgagccccggcacaggccgcctgatgggaccgtctcttccttggggaaactgaggcccaggttgctggggtggaggggatgtggagtgacagggcagggcaatggctcctcggccccctccgggaacaaagccaggtcattcctgtggggagggagcgccaaccccagggttggggggggcacgggccctgggtcaggggtacagataagcctgggctcccagaacccttgtcacagcggcacccctgccccatgcctgctttctctccagggcactcagagctgcagtttgcaggacgagagggagacgtgcccaatccccccatcccaggacgctcagccgtgcgtgggctgggcccactccactcccggcgcccacagttgccccagtgaaccggccagtggaggcatcctgtcccgtgtgcgggaaaggaatgaccgccaaggtgacagcagcgcttagccaaccctggcgctgacacctgacttgcaaactgctccctgcctgaggcttcaaggcaggcgagaggctttgtgtgtgtgacttcctccccgaagggacactggcaacagctggagacatttcctgttgttaaggctgagggggagctgctggcatttggtgggtggaggccagggatgacgttaactgttctactacgcccaggacagcccccaacacacacaacagcctggcccaatgtcacgagagctgaggtggaacagccctgttctgcttcaggtcttcaggtctttgggggtcaaggatgcaaatagaggactctgctcccaattcagctcacataaaagaaccggccgggcgctgtcgctcatgcctataatcccagcgctttgggaggccgaagtgggaggatcgcttgagcccaggagtttgagaccagcctgggtaacatagcaagatcccatttctacgaaagtacaaaaattacctgggcacggtggcatgcacctgtagtcccagcggcttgggaggctgaggtgggaagtttgcttgagcccaggaggttgaggctgcagtgagccgagatcatgccagtgcactccagcctcggcgacagagttagactctatctcaaaaaagaaaaaagagagaaaacccaccaacttggaaaattaaaacagccccaagggcatctaggaacagttaactgcacatctaaacccaggcccgccgttcttagaagctctgcaagctgcatggactgactcctgacatttcagggctagactcaaaaatccctttaaaaaaattttgtttctgagacggagtttcactcttgtccaagctggagtggaatggcacgatctcggctcactgcaacctccacctcctgggttcaagtaagtctcctgccacagcctccagagtagctgggattacaggtgcccgccaccatgcctggctaacttgtatttttagtagagatggggtttcaccatgttggccagactggtcttgaactcctgatgtcaggtgacccacctgccttggcctcccaatgttgctggtactacagacatgagccaccatgcctggtctcttcttttttttttttttttttttttttgagacagtctcgctctgtcgcccaggctggagtgcagtggctcgatctcggctcactgcgaactctgccgcctgcgttcacgccattctcctgcctcactcagcctcctgagtagctgggactacaggtgcccaccatcatgcccggctaactttttgtatttttagtagagatggggtttcaccgtgttagcctggtctcgatctccagaccttgtgatccgcccacctcggcctccctaagtgttgggattacaggcatgagccaccgcgcccggccccctttttttttgttgttgacacagggtctcacttcgtcccctaggctggagtgatgtggcgcagtcgtagctcaccacggcaacttcctgggctcaagcgatcctcccacttcaggccccgaagtagcgggggatacaggcaggcaccaccatgcccggctaatttatttttttcttagtagaggtggggtttcgcaatgttgcccaggctggtctcaaattcctagactcaagtgatttgcccgcctaggcctcccaaagtgctgggattacaggcatgagccacaacagctggcccctttctaagacagggtctcattctgtcacccaggctggagtgcagtgacactaccatggctcactgtagcctcaacctcccaggctcaagtgatcctcctgcctcagccgcccgagtagctgggactacaggcaagcaccaccagacgctgttaaagcttactgttccctctgcctaaaaacgcccctctctgattaagaactgcacttaagttcagtcgtggaaagggacatgatgaaacccaagcccaagttcacggaactaacacattcaagggcaaagctgtatctggggacaactgtcagtgggacccaacctccctctctcctccctcaggcaggcaggtggtgtgcacgcctcctttccttagcggtacccaaaacaccgaggatgggagagtgatgaacacattgattggccggccctggactggagtacatgttcagttagggtttattttggtatctgtcatagaaaacccccaaaaccagcagcttacacaaggtagaagttgagattggttctccccttctctctcccatttaaataagtttgtgctgatatctggctctgccatcatcagggaaccaggctcctgtcatccctaaaggacggcactcgtctgtacacgtggcagtatggctgccagggctccagccatcacacccacattccaggaaataggaagggggaagaaagggtgtatttgtcttttaagaatccttctagaagtgtcatgtaacatttccacatacatttcactggccagaccttaactataagggcagctgggaagtgttgtattttaactcccaaagtgctaggatcacaggcatgagccaccacaccaggccaaattttttaatttttttgtagagatggggtcttgccatgttccccagtctggtctccaactcctgggctcaagtgatctgccggcctctgccttctacagtgctgggattgcaggcatgagccaccacacctggcctccttatctttttaagtcccggcacaaaagtcgcttctgtcctccatgaagcctgcacactctggtgtggctcctgtcgcaatctggacctctctccagttctagagtgttgtctgcttttgtgttaattcctccgtcagcagtgggaggagaaccatgtcactcgtatcttgtctctctggtgcctagcagagtctgggcacaccgtggcactcaaacataccccctgaatgagtaagggccaaccttgaagtacctgggagctgtcatcgaataccacggtgtcatttgtcccatcccgtcacagatgtgaaactgcaggcctggcatagataagtcgactcccgttggttacctagctgaggccactctaggagctgaggccgaaaatcaggagaaaaagaaatccagtaaaaaaaaaaaaaaaaaaggccaggcgcggtgactcacacctgtaatcccagcactttgggaggccaaggcgggcagatcacaaactcaggagatggagaccatcctgtctaacatggtgaaaccccgtctctactaaaaatacaaaaaattagctgcgcatggtggcaggtgcctgtagtcccagctactcaggaggctgaggcaggagaatggcgtgaacccgggaggaggcggagcttgcagtgagctgagatcgcaccactgcactccagcctgggcgacagagtgagactccgtctcaaaaaaaaaaaaaaaaggaagacgtctagctgggcacgatggctcacgcctggaatcctagcactttgggaggccaaggcgggcgggtggatcacctgaggtcaggagttcaagaccagcctgaccaccatggtgaaactccatctctaccaaatacaaaaaattagctgggtgtggtggcgcatgcctgtaatcccagctactttggaggctgaggcaggagaatcgcttgaacccaggaggcagaggttgctgtgagctgagattgtgccattgcactccagactggacaacaagagtgaaactctgtctcaaaaaaaaaaaaaaaaagatctatgtccccacatttcatttgaaatggatctgaccacggcagatgcccgctgggtgcaagacgcagccacgaggctcctggctaccactcggtgtccaccagactccagaggtagtcgctgatgaatttcctggagagctgggtgctgtccaggtggatgggctgggccacactggggccatgatggactgaggcacagatgtaaggaaagcccgggacacacagcccctcacacaaccccacggggaaaaggatactgcctttactttttttttttgagacaaagtttcattctgtaggccaggctggagtacagtggtgcgatctcggctcattgcaacctccacctccagtggttaagtgattctcatgcctcagcctcctgagtagctgggactacaggcatatgccaccacgcctggcctcaggtcttctgcccacctcggcctcccaaagtgctgggattacaggcgtgaggtaccacacttggcctgctatactttactatatttattatagacgtggggtctcactgatacccaggctggtctcaaactcctggcctcaagtgatcctcccacctcagcctcccaggtagctgggacaacagatgcacgccaccacacccggctaatttttacagggtcctgctatgcaccattttatgtccctacctacagtgcacaagggttaaaatggctccccaaaaaggatactgcctttgaccatccctggctcacactcataatcccactcaattttactaacttggtggtaaagttgagccacgtacctgtacaggaagacaaaaaaaaaaaaaaaaaaaaaagaaagttacccagcaccaacttcaaccaagagccggactgcacaaggaggcacaggcaggcacacgttttggcagaacctacacggccgaggggattgtgactgtcgtgtcctcgtcgacctccttctcctgtcgctccagatccgcctcaatctccttgagctcttccagctctctggtgagctgagtagggcaggtcgttaaggaccccggctttcgagagagggctgcccctgcgctaactgcagctgggaggcccagggtcttggctctatttacgcacactctcttctttgagtcagagttttgctttgtcacccaggctggagtgcagtggcacgacctcagctcactgcaacctctgcctcccaggctgaagtgattctggagcccctgcctaccgagtagctgggattacaagcacacaccaccatgccctgctaatttttgtatttttagtagagacagggtttcaccatattggccaggctggtctcaaactcctgacctcaactgatctgtctgcttcggcctcccaaagtgctgggattacaggtgtgagccaccgcgcctggtcttttcttttttttttgagacagggtcttgctctttcacctattctggagtgtagcctcaatctcccaggaccaagtaatcctcccacctcggcctcccaagtagctgagactacaggtgtgtaccaccatgcccagcttattgattgattgattgattgagacagagtcttgttctgttgcccaggctggagtgcagtggcatgatctcagctcactgcaagctccgcctcctgggctcacgccattctcctgctgggaccacgcccggctaatttttttttgtatttttagtagagacggggtttcactgtgttagccaggatggtctcgatctcctgacctcgtgatccacctgcctcggcctcccaaagtgctaggattacaggcgtgagccactgcacctgacctaatttttttatttttgtagagacggggtctctgttgtccaggctggtctccaactcctgggctcaagtgatcctcccacctgggcttcccaaagtgctgggattacaggcttgagccactgcgcctggccctatgcgtgttttctagcaaggctgatcccctagcagaaaaggatataggaggctggccttcagacgggtgtcctcctccccagcctcctgaagcccagcttccagctgctgcagctccacgcctccctggtgcacctgctccttcgcattgagaaggctctgggccacttccttctccatggtgaggatctctgcagggtggagagaagcaggctccctagggtctgtccttccccaaggagagcagagagaaggtggttccacttgcctccactggcaagaaacatgccccttgtctgcagccctgtgtccagagagttctactggcaacttgtacaactactgtttcaccaaaacacatttaaatacactaaaaataaagcctcgtccttcacacacctaaaatataacaaaatagttggccaggcatggtggctcatgcctgtaatcccagcactttgggagcctgaggcgggaggatcgcttgaggccaagagttcaagcctgggcaacatagggagatcccatctctacaaaactaaaaaaaattaggctgggcatggtggttcacacctgtaatcccagaactttcggaggccgaagtgggcagatcacctaaggtcaggagtttgagaccagcctggtcaacatggtaaaaccctgtctttttttttttttttgagacggagttttgctcttattgcccaggctagagtgcagtggcgcagtcttggctcactgcaacctccgccttccagtttcaagtgattctcctgcctcagcctcccaagtcactgggattacatgcgcctgccacgacacccagctaattttttgtatttttagtagggacggggtttcaccatgttggtcaggctggtctcaaactgctgacctcgtgatccacccgcctcagcttcccaaagtgctgggattacaggcgtgagccactgcgcacggcaaccctgtcaatattaaaaacacaaaaaattagccaggtgtggtggcaggcgcctgtaatcctagctacttgggaggctgagacaggagaatcacttgaacccaggaggtggaggctgcagtgagccgagatcgtgccactgcactccagcctagggggctgaggaaactccatctcaaaaaaaaaaaaaaaaaaaaaaaggctaggtgtggtggctcatacctgtaatcccagcgctttgggaggcccaggcagatcacctgaggtcaggagttcgagaccagcctgaccaacatggagaaaccccatctctactaaaaatacaaaattagctgggcgtggtggtgcatgcctgtaatcccagctacttgggaggccaaggcgggacaatcacttgaacctgggaggcggaggttgcggtgagccgacatcgcgccattgcactccagtctgggcgatagagcaagactccatcttaaaaaaaaaaaagaaaaaaggctactggtggctgggcacagtggctcatgcctggaatcccagcactttgagaggccaaggcagaaggatcacttggacaggagtttgagaccaccctgggctatgtggcaaaaccccatctctactaaaaacacaaaaaattagctgggcattgtggtgtgcacctgtagtcccacctacttgggaggatcacctgaaccagggaggttgaggctgcagtgagccataatcgctgtcactgtgccactgcactccagcctgggtgacagagagagaccctttctcaaaaacccaaagcaaaccaaaataaaacaaagatggctactgttccttcctagaaacctgccaactcagagaatgcagattaaatgcccaggccaggcgcggtggctcatgcctgtaatcccagcactttgggaggccgaggcaggtggatcacgaggtcagtagatcgagaccatcctggctaacatggtgaaaccccgtctctactaaagatacaaaaaattagctgggcgtggcggagggcgcctgtagtcccagctacttgggaggctgaagcaggagaatggtgtgaacctgggaggcggagcttgcagtgagccaagatcacgccactgcactccagcctgggcgacagagccagactccgtctcaaaaaaaaaaaaaaaaaaaaaatgcttcccaaagggcccatgtttaagttttagaaacttacattatttttaatcagagtatgacatgtatatggttctgcaaacatgaacacacacgcacacacccttctccaagcctctccgtccctctgaagcagccactttcaagttttagctgttttctctggcactggcctccacatttctaagttaacttgcttatgctgctatttcttgatcggtctggttcggatggggcctgctgatttcctgttaggacagctgaggctctggctggctcacacagccttcccacccgctgtctgtccgccctcccgaaggacaaccaagtcttcttgaattcttccctgagtagtaatctctaccccatggctgttcattataaggtgctcctacctgacatattctcacacagctgaggggatactttttttttgggggggggggatggagtcttgccctgtcatccaggctggagtgcaatggcacggtctcagctcactgcaacctccgcctcccaggttcaagtgattctcctgcctcagcctcctgagtagctgggattacaggcacccaccaccacgcctggctaatttttatatttttaccggagacggtgtttcaccatgttggccaggctggtctagaattcctgaccttgtgatccgcccaccttggcctcccacagtgctgggattacaggtgtgagccaccgcaccaggcctttttttttttttaaacttttattattatttttgagacagtcttgctctgttgcccaggctggagtgcagtggcatgatctcagctcactgcaacctctgcttcccaggttcaagctattctcctgcctcagactcccgagtagctgggattacaggcatgcaccaccatgcctggctaattttcttatttttagtagagatggggtttcaccatgttggccaggctggtcttgaactcctgacctcaggtgatctgcttgcctcagcctcccaaagtgttgggattacaggcatgagccactgtgcttggcctatttttttgagacagtcttgctttgtcatccaggctggaatacagtggtgtgacctcagctcactgcagccgccacctcccaggttcaagcaattctcctgtctcagcctcccgagtagctgggattacaggcatgcgccacaacggccagctaatttttgtaattttagtagagaccaggtttcaccatgttgaccaggctggtctttaactcctgtcctcaagtgattcacccacctcggcctcccaaaatgttgagatgagaggcgtgagccaccacacccagcctgagggtgtactttaactcctctgccccacatctgtgacatgaaaaacaggtccagagacagaagttcagtgactcgcccacaggtacatagctccaaacctaggatgtgaactggatctgtttgacccaaagcctaggatccctggatcctgattctcagttttcttggccccagattcatccattctgctaacagccaggctggccgagtcacatctttctcctcaagccatcaaaggagggggagttaatggaggggtggaagaaggaggagggaaggagggaagagcctgcttgggacatcacattcaggataatattcagactcctcctgggcactctccaggcctggcagtcaggcggctgctgagctcatcttctgcttgccaagttcattctcacctcctgacctttgcatttgcaatccacgctgccaggaacaccgttcctgagccaccccgtggactggctccataggccaatcaaggctcagcccaggcctcctcataaaatgtgactgtataaggcacctgaaacccctggcactgcagctgtcagggagaaccgtatggcggttcctcagaaatcaaactttgaattaccatttgatctgcttctggctgaatacaaaaaagaactgaaaatagagtcttggctgggcgtggtggctcacgcctgtaatcccagcactttgggaggtcggggcaggtggatcacgaggtcaggagatcgagaccatcctggctaacacggtgaaactctgtctctaccaaaaaaaatacaaaaaaaaaattagccgggcgtggtggcgggtgcctgtagtcccagctactcgggaggctgaggcagaatggtgtgaacccgggagacggagctcgcagtgagccaagatcacgccactgcactccagcctgggtgacagagcgagactccatatcaaaaaaataaaaaaaagaaaatagagtcttgggctgggcgcagtggctcatgcctatattcccagcactttgggagaccgaggcgggcggatcacgaggtcaagagtttgagaccagcctggccaacatggtgaaaccccatctttactaagaatacaaaaattagctgggcatgttggcacgtgcctgtaatcccagctacttggcaggctgaggcaggagaattgcttgaacccaggaggcataggtcgcagtgagcagagatcacgctgctgtactccagcctgagcagcggagtaagactgtcctgggaaaaaaaaaaaaaagaagaaaatatggctgggcacggtggctcatgcctgtaatcccagcactttgggagtccgagacgtgtggatcatgaggtcaggagatcgagaccatcctggctaacacggtgaaaccccgtctctactaaaaaaatatatataaaaatattagccgggcgtggtggcgggcacctgtagtcccagctactcgggaggctgaggcaggagaatggcgtgaacccaggagacgcagcttgcagtgagccaagattgcgccactgcactccagcctgggtgacagagcaagactccgtctcaaggaaaaaaaaaatacagtcttgaagagatatttgggcacccgtgttcatagcagcgttattcaacacagccaaaaggtggatacaacccaagtgcccatggatggatgaatgaataaacacaatgcggtccatccttctatatcatgaaatatgactcagctttaaaatggacggaaattctggccaggcgtagtggctcacccctgtcatcccagcactttgggaggccgaggtgggcgatcacttgaggctgggagtttaagaccagcctagccaacatggtgaaaccccatctctactaaaaatacaaacattagctgggcatggtggcgcataagtgtgttctcagctacttgggaggctgaggtgggaggatcacttaagtctgggaggcagaggttgcagtgagccaagatcacaccactgcattcaagccagggtaatggagcgaggctctgtctcacagtaagtacacaaaatgaaaggaaattctgatacaggctatgacatggatgaacctggaggacattatgctccatgaaataagccagacacaaaagggtagatattgtatgattccactaggaagggtagatattgtacaattcctcgtaaggttcctagaggagtcaaatttgagacagaaagtagaaccctggtgggtgccagggtctgagaaggggatggggagtgagtgtttcatggggacagagcttcagtttggaaagatgagaaagttctggagatggatgatggtgctgatggttgcacagcagtgtgaatgtgcttaaggccactgaactgtgcagttacagatagtgaagatgggccggacacagtggctcacgtctgcagtcccagtactttgggaggctgaggcaggcagattacctgaggtcaggagtttgagaccagcctggccaacgtggtgaccccccgtctctaccaaaaatacaaaaattagccgagtgcggtggcaagcgcctgtaatcccagctactcaggaggctgaggcaggagaatagcttgaacccgggaggtggaggttgcggtgagcccagggcctggcagcagcagatgctccataaaacatctgaatgccttcaggaagaagggatgggctattgtcacaaccatttgacaaggaaggaagctgaggcacagagaatttaagaaactcacctcaagtctcacagcggacatggggatgggtgctaggattcaaacccggagctttgactcctgagccccagttcaaaccctgagacccccagctcctgctcacggagagctcagaaggggccaacccctccagactcctatatttaccactaaacccctggggggtgggggatggttgctgtcataaagccgatttctcagatggtgaaactaaggctcagagggggccgtcccagggggcatagggcaggagatgggagagtccaggagagaaggggttttgaggtgggcctggtcgccccctcccagcacccgggccccttcccccgtgggcccgcgaccacgctccgaccctcacctcgcagctgcttctcggcaccgtcttgcgtttccagcagccgctccaccacctgctcgtggcgccccagcagccgtcgctgctgcgcctccgcgcggttggcgcccagcaggctgagcagcccctggctcacctcctctatgtcgcggaaggcggccatgactacgccaggctccaacccgcgcaaatttgactgtccgcggggcccgccctcttccagaagaggttgctttccattggattttttgatacgtcagtcataagcaatggccaataggcatggggaacaggatcttagactgggctaagccgcctttggtctggcctggtgcgcctgcgaccactcctccgtcagtcatcggtgatgaccaatcggcgcaggaagggggaggctccgttatccttcccgatgcgcctgcgcgggagagaaagcggctgtttatttctccataggtcgagcgcttgctctgtgcagggtggggttctaacggcaaagcagcgagcagcttctcctggaacttacatcctacagtgtgtgcgtgggatacacaataagcatagagaataagtagattctatgagaggctgcatagcaaaatggcgtctgcagccagatttactgggttcgaatcccagcgttgccacttactagctgtgttaccctggacagacttcacctctctgtgcggtactttcctccttagtaaaatgagggtcatactagtgcctgtgtcagcgttggcgtgagaattcttcttattactttttttttagagacaaggtattgctctgtcacccaggctgaagtgcagtgccacaatcatagctcattgcaacttcgacctcctggcctccagcaatcctcctgcctccgcctcccaaagtgctgggattacaggcgtgagccaccgagcccagcctggcgtgatagtgtctcctattcagtaggtgctatatagttgtttaatgaaacatacatagaatcctagcatgtagctgggtgcagtggctcacgcctgtaagtctgagctctttggaaggctaagacaggaggatcgcttgagccctggagtttgagactagcctgtctcaaaacaaaacaaaacaaagaaaagatcagtgctgactctaaggtgctggttccatgctagacactggtatttctgcaagaaacaagatgttaagatggcatctttttttctttctctctctttttttttaagacagagtctcactctgttgcccaggctggagtgcaaggcattccagcctgcttcctgggttcaaggcattctcctgcatcagcctcccgagtagctgggattacaggtgcccgccaccgcacccagctgattttttgtatttttagtagaaacggggtttcattatgttggccaggttggtcttgaactcctgacctcgtgatctgcctgcctcaggctcccaaagtgctgggattataggcgtgagccaccgcgcctggcgtggcaacatttttatgtgtgctaccacctaaagaacatctcattgctttcctatgatttttttttcttttcttttcttttcttttttttttttcttgagacagagtttcgctgttgttgcccaggctggagtgcaatggcgcgatctcagctcactgcaaccaccacctcccaggttcaagtgattctcctgcctcagcctcccgagtagctgggattacaggcatgcgtcaccatgcccagctaattttgtatttttagtagagacggggtttctccatgttggtcaggctggtcttgaactcccgacctcaggtgatccacctgcctcggcctcccaaagtgctgggattacaggcgtaagccactgtgcccggccttcttttcttccttcttttttttttttttttttgagatggggtcttgttctgtcccccaggctgaagtgcagtggctcaggtgatcctttcatttcaaccttccaagtagccgggactacaggtgtgtgtcaccctttggtgcctgagagcatggcttcttgaaccagctgtgtaatgttggcatagacctcacttctttgtgcctaaaggcagtgaataacaattaggcagagtgaaatcaagaggggaaaagacttcaggttcactttctgatgctgcagcttacctgtgaccttggcaggttcctaacctttctaagccatagtggctaaagatagccctttcttattagctgccaggaggtgtcccagagataagccaggcaagattgtgcaactcgagcctgatagatctaaaggctcctgtggaaaaatgccacccgcccacctcccttccaaaaaagcaaagcgagaaccgcttcccagccattaggatggctactgtccaaaaccaaccaaccagccaagcaacctggaaaataacaagtgttgaccaagatgtagagaaattggaatgctgtgtacccttgctgagaatgtaaaatggtgcagctgctgcgggaaacagtatggcagttcctcaaaaaattaaaaatagtattaccatatcagcaattccacttctgggtatagccccaaaagaattgaaagcaggttgttgggccgggcgcagtggctcatgcctgtaatcccagcactttgggaggccggggcgggcggatcacctgaggtcgggagttcgagaccagcctgaccaacatggacaaaccccgtctctactaaaaatacaaaattagccaggcgtggtggcgcatgcctgtaatcccagctactagggaggctgaggcaggagaatcgcttgaacatgggaggcggaggttgcggtgagctgagatcacgccattgcactccagcctgggcaacaaaagggaaactccgtctcaaaaaaaaaaaagaaaaaaaaaagaaagaaagaaagagaaagaaagcaagtcatagagcagatatttgcaagtctatgttcatagcacccattatagcgaaagggtggaaacagcacaagtgtccttagatagaagaattaataaaacgtggttcatctctacaacacaattgtttttttttggttcatctgtacaacgcaatttttttttttttgagccaccatgcccggacacaatttttttttctttttcctttttttttttatgagacaggatctctctgccaggctggagtgcagagacgcaatcatggctcactcaacctcctgggctcaagcaatcctccaactttagcctcccaagtagctgggactacaggcacatgccactacacccagctaattattttttttttcctagagacaggggtctcattgtattgcctaggctggtctccaactcctgggctcaaatgatcctcttgcctcagcctcccaaaatgctggcattacaggtatgagtcaccgtgtctaccatgtctggcccataggacagaagattattcagccttaaaaaggaaggaggccaggtgcggtggctcacgcctgtaatcctggcactttgggaggccaaggcgggcggatcacgaggtcaagagattgagaccatcccggccaacatggtgaaaccccgtctctactaaaaatacaaaaattagctgggcctggtggcacgtgcctgtagtcccagctacttgggaggctgaggcaggagaatcgcttgaacctgggaggtggaaggtgcaatgagtcgagatcgcaccgctgcactccagcctggtgacagagtgatactctgtctcaaaaaaaaaaaaggaaggaaatgctgaccaggtccagtggctcacgcctgtaatcccagcactctggtaggctgaggcaggcagatcgcctgaggtcaggagttcaagaacagcctggccaacatggcaaaaccccgtctctactaaaaatacaaaaattagccaggcatgatggtgcacacctgtaatccctgctacatgggaggctgaggcaggagaatcacttgaacccgggaggcggaggttgcagtgagatgagatggcgccactgcactccagcctgggcgacaaggagcaaaactccatccccaccccgcaaaaaaagaaaggaaattctgacacatgccacgaggtggatgaagacatgttcagtgaaataagccagatacaaaaagacaaacactgcgtgattccacttagaggaggtccctagagtcgtcagattcataaaaacagaacgtagaatggtgggtcccgggggctggggaggggtatggggagtgagtgtttcatggggacagagtttcagttttgcaaactgagaatgttctggagatggatggtagtgctggttgcacaacagtgggaatgtgcttaatgccgttgaactctgcactttaaaatggttaaagtcgtacattttatgtcatgtatattttaccacaattaaaattaaaaatatactaaaaaaaaaaagcaaagcaagaaactgtgtgatggcgggaataggtcttaaaggtgagctgaacaagagaagtaaagataatgacaaatggtcctggcaatggctttgtgagaaagtttatttcctaagaacccttcttggctcacaaagccagaggaaactgacacgagtaatggaccttctgcctagaaatacactccttagcataacatttctgggtcttccaaaaaccttctgttatctcctgactgaacagcctagtggataaacagaggaaatgagaagtcaggagatatgattaccgctgggagatctgaggggaggggcccgtgggctgctagggccaatgatattccttttccagttctggtgccggcaacttgggggtgccgtttgcaaaaaagccatggaaggaactgtacacttttgtgcaccatttgtgcacagaatgtattcattttatacctgaagaaaaaagaactgtaaaaaaaaattaagaccaaatatattagaaaaagatttggtaggagatgctccaaactgttgacaatggtattcctaccaagtgggattatggcatgctgcaaggactaaacactgctgtattgtttgaatttttatttttatttttagatggagtttctctcttgttgcctaggctggagtgcaatggcgtgatctcggctcaccacaacctccaccttccaggttcaagcaattctcctgcctcagcctcctgagtagctgggattacaggggtgtgccagcacacccggctaattttgtatttttagtaaagacaaggtttatttttttctttttgagatggagtctcactctgtcgctcaggctggagtgcagtggtgcgatctcggctcaccgcaagctccgcctcccgggttcacgtcattttcctgcctcagcctcccagtagctgggactacaggtgcccaccaccacgcctggctaattttttgtatttttttaagtagagatggggtttcaccgtgctagtcaggatgatctcgagctcctgacctcgtgatgtgcccgccttggcctcccaaagcgctaggattacaggcgtgagccaccactcctggccttttttttgttttttgagacggagtctcactctgtcacccaggctggagtgcagtggtgcgatcttggctcactgcaaactctgcctcccgggttcacgccattcttctgcctcagcctcccgagtagctgggactacagacacacgccaccacacccagctaattttttgtatttattagtagagatggggtttcaccatgttggccaggatggtctcgatctcttgacctcgtgatccacccgccttgacctcccaaagtgctgggattacaggcgtgagccaccacgcccggccagagacagggtttcgccatgttggtcaggctagtctcgaactcccgacctcaggtgatccacccgccttggcctcccaaagtgctgggattacaggcgtgaaccactgcacccggctcgaattttaacttttttttttgagacggagtctccctgttgcccaggctggagcacagtggcacaatctcggctcactgcaacctgtgcctcccaggttcaagcgattctcatgcctcagcctcctgagtagctgggattacaggcgtgtgcaaatgcacctggctaatttttgtatttttagtagaggcagggtttcaccgtattgatcaggctggtctcaaacttctgacctcaggtgatgcccaccttgacctcccaaagtcctgggattacaggggttagccactgtgcccggctgaattttgacttttataataaatcgctataaattatttggcattagaatacaaaagtcaccgaagagccaagttttaggccaggcatagtagttcatgcctacgatcccagcacattgggaggctgaggtggggagatcgcttgagcccagaagtttgaggccagcctgggcagcatagagagactccgtctatacaaaaaataaaaaaaattagccaggcatggtggcacacacttgtagtcccagccactctggaggctgaagtgggaagattgcttgagccccggaggttgaggctgcagtgagctatgatcgcaccactgcactctaccctggtgggcaacagagtgagaccctgtctcaaaaaaaaaaaagaaaagaaaagaaagaaaaagattgatttttttttcctgaggtgttcacagcaggtgttcaacaaaactttgtacgatggcaatattcagtatctctgcaagtcaatacagtagccaccaaccacgtaaagctatcgagaactaattataattcattgactttatttatttacttatttttgagttggagcctcactgtcgcccaggctggggtacggtgctgcaatcttagctcaccgcaacctccgttttccatgttcaagtgattctcatgcctcagcctccccagtagctgggattacaggcatgcaccaccatgcccagctaatttttttctatttttagtagagatgtggtttcaccatgttggccaggctggcctcaaacataaatgatccacctgcctcagcctctcaaagtgttgggattataggcgtgagccaccgcgccaggcataattcatttacttaagatttttttttttttttttagaaacaaggtctcactctgtcaccaaggctggagtgcagtgggacaatcatagctcactgcagcctcgaactcctggcctcgagtgatcctcccacccgcctcagcctcctgagtagcttgggactacaggcacaagccaccaagcctgctaattataattaattaattcattcattcatttatagatggagtcttgctctgtcacccaggctggagtgcagtggggcaatctcagctccctgaaacccccgcctcctgggttcaagtgattctctggcctcagcctcccgagtagctgggactacagatgcccgctaccatgcccagctaattttttgtatttttagtagagacagggtttcacgatgttgcccaggctggtcttgaattcctgacctcaggtgatccacctgcctcagcctcccaaagtgctgggattacgggcgcgagccaccgcgcccggcctcatgtacttttaaatgaaaatagccacatgtagctagcggctacactattgttgggtgctggtctaggacagagcatgaaggtgtttactgtgatattcttgcaactgttctgtagctttgaacactctccaaaataagtccattttgaaaaagagatttgcagcagctcacgtgtgtaatcccagcactttgggaggccgaggtgggagagtggcttgggcaacatagcaaaaccccgtttctacaaaaaatttaaaaattagtccaggcgcagtggctcacgcctgtaatcccagcactttgggaggtcgaggcgggtggatcacttgatcaaggtcgggagttcaagactggcctgaccaacatagtgaaaacccatctctactaaaaatacaaaaattagctgggtgtggtggtgggtgcctctaatccaagctatttgggaggccgaggcaggagaattgcctaagtccaggaggcggaggtttcggtgagcctaaatcacaccactgcactccagcctgggagacagagggagactccgtatcaacaacaacaacaacaacaaaaagtcaggggtggtggcgcagcctgtggtcccagctagtcgggaggttgaggtgggaggatcgcttgaaccctggaggtagagactgcagtgagctatgattcgcaccactgcactccaacctgggagacagagtgagactctccaaaaacaaaaagtggtggctcacacctgtaatcccagcactttgggaggctgaggcgcgtggatcatctgaggtcaggagtttgagaccagcctgaccaacatagcgaaacccccgtctctaccaaaaatacaaaattagccgagtgtggtgggcacctgtagtcccagctacttgggagaatcgaggcagtagaatcacttgaatccaggaggcagaggttgcactgagccaagatcgcgccactgcactccagcctgggtgacgagaagcaaaactccgtctcaaaaaaagaaaaaagaaaaaaaaaaggaaagatatctatcttaaagcttaaaagggagcacagcgaaaaaagaaaagacacagaatcatcaacattattggtagctttattaaatttgtttaccttctaaaaaaaacgattacaaaaaagaatacttcatttaagtgtaatactggctttatggacgtaccgtgatcagaaagtgaaattaaagctcatggatatgcgtgagaagagaatgggcgcagaggcacgagtccagtatcccacggagagaaggaagtgtagagagatgcgtggacccatctcaggggtcacgcattcctgggccaaggagttgcttctaagagcttaaaataaatgcactggctggctccagggctggacacacaggcacagaactcttgtaccgcttctcaaagctgcccaaagctgcgaccttccccctcagacacccacaattaattgtttccaatcagctttggttttgttttctctgcaatttacatgcaaacaccatctatctattcatccatccatccatccatccatccatccatccatccatccatccatcctgcttgtctcctttgaccagccaagccctattttgttttacgtacattcccttcactaaaaatcaaagcaagccagtctacatcaagccaagaaacctacttttctaaggagagaaaccagtgctttgccttctttaatgaacctgcgagctctcagcgctttctcttgctgaaatgtggctttaaagccttggaggctgagctcactggcctcgaaagggcagcgcgcgtatttggtttggagcgcactcctgatcacaaagcacatttttagaggcttggaacccttccctttctgttgctcaccaaggaaaaggcacaagaaagacaatgatgtggagattcttaggggaccaaaacaggccatgaaggaaactgtgagtgtctctggcaagccccgtttcccgcaggctctgttccaggcagctccggaaagtctctaggttgttaaaaagcccagctggcccatgtttggttttcagcaaagccctgtctcttgaagtttgcgctgggaggcctggggacggccaacttttaatcgtacacacatggggtttttgggagccggccctgcgttttgccaacaagcgcatgccctgttttctttcctttgaggagagaaattctggagtcccggggaggaacaggacggccctgtgaccatagtctggggcctggcggcggggacgcagaagccaccctgagagccagattcttttcctgcgtcttcaggtctgaaggattttctaggaaaattaacatttgccaaggcctccatgtggggaagggaggggtttctgggtaatttgtctctttttcttttctttcttgagacagggtctcgctgtgtcgcccaggctgaagtgcaatggtgtgatcatagctcactgtagcctcgacctccagggctcagcctcccaagtagctgggactacaggcgcgcaccaccacgcctggctagtttttaaatttcttgtagagatgggtcttgctgtgttgcccaggctggtctttaacgtctaggctcaagctcaagctcttgccttgccctcccaaagtgctgggattacagacgtgagtcaccacgcctggccggtaatttctcattgtgaattgattgggtccctgtaagtcacagagcctgtcctgagtcccttcatctgaatgagggtgaaaagactgagttttctgtcccgggtgacaaggacagaatctgtcttgtgaaacaaccagaagaaaattcccctaagaaagccgtctagcggggcagtggacacaacactattctatatcagacaattaaatgtgggggatgaagggtgaaccccaactggtgcgtaataacacttaggattaaaatgaaaatatgcaagttccagtgactttcaaatctggcaacaaatcctaagattcccaccccctcctgcaacaatgattcaaaaatacaatatttttttcctctccctcttcctccatccataattaccagctgattgttctcaatgttcttcataaaacccacaccccagcatcagccctggcgccaatgtatacaagaattttgcttcggtctgcgctgtggccactttgaacaggggagccaagaaaacccacttggagctggagtcctgtggccgtcggggctcccccagggaagcagagggagagctcgcttgcctttgagccgtgggccttggggagtgtgagtggggtgggccagggaggaacgggaacagggaggagacggggacaagggacggtttgctcccggtctggctggtccccgcctccctcacggctactcttctgccgaggatgatgtagggctctcgtcatctgacattggggcaaactgaaacagagaagcagaattctttttgtttgggatcctttccaatcccccgaggcgccaacgtggtggctggcctggtagatatgatgggtaagcaggagggaggcgtggcccctggccccaaggaggtggcgatctgggggcaccgccttgaagaagcaaactcatgactgtggttgaggatgttcaccgggggtgagggatgcaaaggaatgagggtggacagtggctggtcagggagggtgagttctcagctgactgtgaacggcatcaaggagccagcgagcagggaagagcattccaggcagcggaaacagcacgtgcaaaggccctgggataagtgcagaggggtgtggcaataaggccagtgtggctagagggggagagaaacagtagtggggaaggtgagggtggttgtgcagggcctggtgggctttggagaggaccctggctttttcttttcttttttttgagacagagtttcactcttgttgcctaggctggagtgcaatggcatgatctcagctcactgcaacctctgcctcctgggttcaagtgattctcctgcctcagcctccttagtagctgggattacaggcaggcgccaccacgcccggctaattttgcgtttttagtagagatggggtttctccatgttggtcagtctggtctcaaactcctgacctcaggtgatccgcccatcttggcctcccaaagtgttgagattacaggcgtgagccaccgtgcccggcctagatttttttttgcttaaagacagggtcttgctctgttgccaggctggagtatagtggtccaatcatagctcacagtagccttgactatctgggctcaagcaatcctcctgccttagcctcccgagtagctgggactataggcatgcaccaccaggcccagctaatttttttttttttttgaggcggaatctcactctgtcacccaggctggagtgcagtggcgcgatctcagctcactgcaacctctgcctcccaggttcaagcaattctcatgcctcagcctcccgagtatctgggattacaggtgcccaccaccacacccagctaatttttgtatttttagtagagacagggcttcaccatgttggccaggctggtctcgaactcctgacctcaggtgatctgcccgccatggcatcccaaagtgctgggattacaggcgtgaaccagtgagtctggcctgaatgctccttaaacacgtcagacacacccctgcctcagggcctttgcactgcttgttcctgctgcccggaagaccatgtgattcactccctaacttctccaggtgttgactcaaatgtcatctcttctctgagggactccaatagcttccccatcactcgccatcccacgtccttgtttttttttttttttttttttctttgagacagagttttgctcttgttgcccaatgtcatgatctctggctcactgcaacctccacctcctgggttcaagtgattctcccgcctaagcctccagaatagctgagattaaaggcatgcgccaccacacccggctaatattttgtttttttagtacagatggagtttcaccatgttggccagcctggtcttgaaccccttatctcaaatcatccgcccaccttggcctcccaaagtgctgggattacaggcatgagccaccacgcctggcctctttctttttttttttcccagacaaggcggcactctgtcaccatgtagtgatgcaaccatggctcactgcagcctcaaattcctgggttcaggtgatcctcctgcctcagcctcccgagtagctgggagtacaggcatgcacctgtatttttgggggagacaggatctccctatgttgcccaggctggtctcgaactcttgggttcaagcaatccttccatctcggccccacaaggtgctgggattacagacgtgagccaccgcgcccagcctgattgtgtctcttaccagaatgctcactccataagggtggatactgttttctgttttgatcagtgctgtgaccactggggactacctagaactgggcctaacatgcagcaggcgctcaataaatatttttcaaatgagtgaatggtgactaagacacgcatttggaaccagacagacccaggcgtgaatactgttatgccaaccatgaccatgcagcctctctgtgactaatttcctcactggggcactatgaaggttcagcaagcagctgaccatattctgactttatccttagcgtgaaccccatgcacaatcagctcttcataaacatccgtctcctctggccaggcacagtggctgacccctgtaatcccagcgctttcagaggcagaagaggaagcatggcttaagctcaggtattcaagaccagcctgggcaacatagtgagacccagtctctacaaaagatgttaaaaaatgtccgggtgcagtggctcacgcctgtaatcccagcactttgggaggcagaggcgggcagatcacttgagctcaggagttcaagaccagcctggccaacacagtgaaatcccatctctactaaaaatacaaaaattagccgggcatggtggtgtgcacctgtaatcccagctactttggagactgaggcaggagaattgctcgaacctgggagatacaggttacagtgagccaagattgtgccactgtactccagcctgggtgatagaacaagactttgtctcaaaaaacaaaacaaaaaaaactcagccaggtgtggtgacgtgcgcctgtagtcccaactactcaggaggctgaggtgaaaggatcacttgagcccaggaagtggagtttgcagtgagctttaattgtgccactgcactccagccttggtgacagagtaagacccagtctgaaaacaaaaacaagaccaggcatggtggctcatacctgtaatcccagcactttgggaggctaaggcaggtggatcacgaggtcaggagtttgagaccagcctgaccatcatggtgaaaccccgtctctactaaaaatacaaaaattagccgggtgtggtggtgcacacctgttatcccagctactcaggaggctgaggcagcagaatggcttgaagccgggaggcggaggttgcaatgagcccagatcgtgccaccgcactccaccctgggcgacagagtgagactctgcctcaaaaacaaaaacaacaaatctctgtcctttcagagacccacccatcccgtgcctacccggccggattgagactcaccgagcacttgatgttcatgcgggaatacagcatggacgcaatctcactctgccctgcgtccaaggccaccatcagagctgtgctcccatcctgcaaagtatccggtgctatgaatgacgtccccatgctgtgctcccgccctccccggggtgcacctggttggagactcacgcgatctgtgagtgagatgtcacagctgggcacggccagcagcagccccgcgatctccttgtggccgtgctcacaggcgcacatgagggccgtggagccgtcatcatcttgcacgttgacatctgcctcacaggccagcagggctttgacaacgtccacccgcccgtggctgacggccagcatcagggccgtctgtcctgcctggggagggcaaggaacaggattatggttcatgcaggccccagggcaggacaccccctggtctagaacctgctgtagctcccacatactctgatggtgaaatgtaccctcaacttgctgatctcctcctgaatctcaaacaaccctcccgtcaccaggggagtaataaatccacagagacagaaagcggatgagtggttgccagaggctgggagaagcgggggcggaggaaatgatggatacaggtttcctttgggggtgaagagaacgttctggaactagacggaggtgttggttgcacaacagggtgaatgtatttcatgccagtagtgcttttggttttgttttgctttattttagagacagggtcttgctctgttgcccaggttggcgtgcagtggcacgatcgcagctcactgcagcctcaacctccccaggctcaggtgatcctcccacctcagcctcccgagtagctgagactacaggcatgcgccacaatgcctggctaatttttgtatcttttgtatagatagggttttgccatgttgcccaggctaattgttcctttaaaagggttaattatttttttttggagatggcgtctcgctctgtcaccaggctggagtgcagtggcgcaatctcggctcactgcaacctccacctcctgggtccaagcaactctcctgcctcagcctcctgagtagctgagattacaggcgtgtgccactacgcccagctaatttttgtatttttagtagagacagagtttcaccatgttggccaggatggtctcaatctcttcacctcgtgatccgcccgcctaggtttacaggcgtgagccatcgtgcccagcctaaaagggttaattctgggcactgtggcttacgcctgtaatcctggcactttgggaggccgaggtgggaggactgcttgaccccaggagttagagatcagtctgggcaacatagcgagaccatgtctctagtaaaaaataaaattaataaaatacagcctggacaacttggcaaaaccccaactctaaaaaaaaattagccgggcatggtgccgcacgcttgcagtcccagctacttggtggcctgaggttggaggactgtttgagcatgggaggtcaaggctgcagtcagctgtgattgcaccactgcactccagcctgggtgacacagtgagaccctgtctcaaaaaaataaaaaatagagataaaataaaataaaaagttagaaataaaggagttaatcttatgttttgtgaatttcaccttctttttttttttaatagagaggaggtgggggtgggggggtgtctctaggttccccaggctggtctggaactcctgacctcaagcaatttatcccgctttgttctctcaaagtgctggggttacaggcatgagccaccttggtgagcctcaccttaatttttttttttttgagatggagtctcactctgtcacccaggctggagtgcagtggtgcgatctcggctcactgcaacctccgcctcctgggttcaagcgattctcctgccttgagtagctgggattacaggcacatgccaccatgcccagctaatttttatatattttttttagtagagatggggtttcaccatgttgattaggctggtctcaaactactgacctcgtgatctgcccactttggcctcccaaagtgctgggattacaggcatgagccaccgcacccggctaattttttttttttttttttgagacagagtctcactctgtagcccaggctggaggacagtggtgcgatctcagctcactgcaacttccacctcccaggttcaagcgattctcctgcctcagcctcccgagtggctgggattataggcacgtgccaccacgcccagctaattttttaattttttagtaaaggcagggtttcaccatgttggtcaggctggtcttgaacttctgacctcaggtgatccacccacctcagcctcccacagtgctgggattataggcatgagccatggcgcctggccttaattttttgaaaatgaagccactaaaaaaatttcttggaaattaaaacaaaattaaatcaataaagataaggcaggatcatgcctgttatgccccgtcacagctccattttgttcctttgctgtcttcagactgttgacgatccctctcctcctcactgtcctcagtgggtcctggcttccctgctcttttgcccagacacctgttcataagccccagtcacctccacagtgcctgtttctgcttcccaacacacagctgaagggagcgctcaaaccaggaatcaggccacgccacttccctgcctaaattcccctggcggtttcctgcagccctgagtccaaactggcttgagtcccggtgctccctaaaatgcttatggcttgaagaacgggctagtgagcttcaggagaccatgcctgcttgttcgccatttcagtccccagttttcggcccagggaacccagctgctgctcaatgaactgtccagcaggatgtgggatggggtcatattaagaaaggtaaggaccctcatatcctctactccttctagtttccacaagaaggtcctgtgtcagagacagcctggccatgaagagcagggctctggagttagaccacctgggtttgggcctgtcactcagctgggatgtcataaagtaggaagagccacctggatctgcagcagccggggtccccatacctggctggctttggcattgatgttgccaagccggaagagctgaaggacagtctcgatgtcgtcctgggtcttcagggtggccagggcggtgagcataatagggctgtagccagcacggttctgtttgtccaccttgcagacacctaagagacatggtgtgaaccctcagaccagggatcgctgctagtggactgccccaaggaacgtggataccacgtctcgtccatcagtctaggcatgccctaatccctcccttttctcagaggaccccactctgccctagaggtctccatctccattagacctggggctcctaaagttggagacagttcctcctccatcagatttggggcccctgatgctggcatctatatttagggctgagaatagaaactgggtctcccctgttaattttggaacagccatttaccctcagactggcccatgtctcccccatcagattgtgggccctgagtccttcatcagcccgggaggctgtctcccccagtaggagagggaagggcaagtttcttactaactgaggaccacgtcttctttccaagccccagacttgaggacgcatccctctcttagaccagggctccagagatgtcacctccatcatgcaggcgtgttaggttcacacgtttccctaacatcacttctgccttttccattatgctggctaaaggtagggcccgtgcctcccccaccagactgggaaggaagtgtctcctccatcagactgggaggacagcatctcccccataagaccaggagggtagagtctctgctatcagactaggagagtcatgtctccctcgttagactgggaaggtggtgtctcactcattagactaggagggtggtgtctctgccatttgactgggaagacagcgtctcctctatcagactgggagggccacattcccccaacaatgaaccgggaagatgatgtctcctccattaaactaggcaggtggtgtctcctccatcagcctgggagggtggtgccccccccatcagactggaagggtggcatctcccatatcaaactgggaaagtcacatttcccccatcagactggggaggcagcatctcctccatcagactaggagggccacatccccaccacaatgaactgggaaggtgtctcctccatcagcctgggagggtggcatctcctccatcagactgggagggcggcatctcctccatcagactgggagggccatataccccaccccattgaactgggaaggtgccgtctcctctatcaaactggaaggctggtgtccctccacatccaatcggaaggtggcatctgccacatcagactgggagagaggtgttccctctattatactgagaaggccgcgtctcctccatcatcttccccatcagatggggagggcagtgtcttccctatcagactgggcatggcggacagctggctggtttagagccgcctcgtcctccccgctgggctcaccgctgtcgagcagctgctgcaccacggggaagttggcatgagacacggagtagtgcagggctgtgttgccgttgctgtcggcgatgttgaccacgtagtccagcagccgcgcagacatggcccggaacgtgaccaggtgccgccgcaccagctcggggtgtgcgtcgctgcggcaggccaggcgcagccactcctgcagcactgtggtgtaggccactttctgcatgcgagtcaggtgggagaggatgtgagggcgggggaggcccactgggacaccccccaccccagatgcgcccccggagcaaagcgtggtgcccttgtcctggaaaacgatctcaagggaagtgcagaccctcccaaagggaagtgtagacatctctgtcccaataagacccttggagtgaggtgtggactttgcaatccccaacacgttccccaaggaaggtgtgagcacctccaccctggatataatttctctctctctcttttttttttttttttgtgagacagagtctcgctctgttgcctaggctggagtgcagttacatgatcaggactcactgcagcctcaacctcctaggctcaagctatcctcccgcctctgcctcccaagtagctgggaccacaggcgtgcaccactatgcctagctaatttttaaaacaatttgtagaggctgagtgcagtggttcacgcctgtaatcccagcactttgggaggccagggtgagcggatcacttgaggtcacgagttcgagaccatcctgcccaacatggtgaaaccccatctctactcaaaatacaaaaaattagccagacgtggtggcacatgcctatagtcccagctacttgggaggttgaggcaggagaattgcttgaacctgggaggcagaggttacagtgagctgagatcgcaccactgcactccagcctgggtgacagagcaagactccctctcaaaaaaaaaaaaaaaaaaaaaaaaaaaaagaatttttttgtagaaatggggtctcactatgttgcccaggctggtcttgaactcctggcctcaagcgatcctcctgccttggcctcccaaagcaccaggatgacaggcatgagccactgcgcccagccctggttataatcgccaaagtcaagtgtagatgcccaaaaagggaaatctgggtgccccgcccctgaagcccccaggaagaacaggaacccaaggccaggcttggccagtgagtgttcatcctccagcctctccccatctccctggcctctctccgaggcccatgacttgagcaccaccacccccatgctctgggcttcagtgtcagggtccccactaggcaggagcaggaagtcactgaggatgaggagaggccacgggtggggtggaggtaggggtccggggggtggccaacctaggcccagggccagatcgtaccagctcccgctctgtgagggcgttgggattgtccaggtacttttccagggccaagcaggctgagatgaggtcagggcttagctccatcctgccaggaacagacaaagcggggaactaagtaagccccgctgcggtgcctgggaagggacttgacattctgcaccacgtcactcacaatagggtcacctgaatggtggcatctcagaccctccttcacccgggacacacatttacattgcaccccaaggggcagctgtggggaacatgcagacccccaagggagagtggacacacaagccaaagtttattccaaatgcccactggcagatggaaaatatttcccaagggcaaattttttcaccaggggaataaaaaagagacataaatagaacagacaggtagaggaaacgtcccaaagtaggtgggtgattttgggataaactttggctggtcccctaaatcctaaccccggcagcccaaaatagttccaccaggccctttagcaaagcctccagaacttcagatgcccagaaggagcaagtgctcgtttgctaattcagactaaagtgtgcatgactgataggagggtccttcaaagggcttgaacggtgggggtttgaggcagaggtcatccacccccggccctgcctgaatccctcctacccagaaaactgacctgatctcctcctccgtgtttgatcctgatgccccctcagcagtgggtatgtgctgagattctcgagacagctgacactcctgccggctggtcttggccgctgccgtccctgcaggcctgagctggggggcttcggccacactcggaaccctctccctcggctctggggcctcgttctctgtgctgtcgttgtctgagatgttctctgctgtgctggagtcctcggatgacgactcatacctggggaggaacgagcggggagggggagatgctgcaggtgggatgagaaatggtgggaaaggaaggcagggatctggtgatctgacctctgtgggcctcagcttccccatctgttcaatggcagtattgacattccagggttgtgggatgtggtttacagcaactggcacacagtaagcgctcaataaacattagcagtgattatgatcatgctcggggggaggggcactgcttttcacctcctgccttttgacacttctagcatactcaccctccttttttttttttttttttttgagatggagtcttgctctgttgcccaggctggagtacagtggcactcactgcaaactctgcctcctgggttcaagcaattcttctgcctgagccttccaaatacctgggactacaggtttgcaccactgtgctcggctaatttttgtattttttagtagagtcggggtttcgccatgttgccatgttggccaggctgatctcgaactgggtttacaggtgtgagccattgcgcacagccacctctagccatttttttttgagacggagtctcgctctgtcgcccaggctagagtgcaatggtgtaatctcagttcactgcaacctctgtctcctgggttcaagcgattctcctgcctcagcctcccaagtagctgggactgcaggcacccaccacacccagctattttttgtatttttagtagagatggagtttcaccatgttggccaggcttgtctcgaactcctgaactcaagtgatccacccgcctcagcctcccaaagtgctgggattacagatgtgagccaccgcgcccggccacttctagcccttttaacacaggtgattcagactcctgttccactgcaaatagggctctctcgtgtttcttgctggctctggacaaaacctaatcaagcttctaggctcggcattcaaggccccaaaccaaccatcactccctgcacctcccacttctcgtgtcactctgctttcccacctctgagcctttacccacgctgtgcccctgccagaagagccctccccacaccctctcttcaccttgctagctcctacttctcccgtaccacctgtgtctcctccttctgggactcccctagggccacctgtgtctttcttgaggacctgcaccacctgagtgttccccatcacggctccaaccacccatcagcacccagctccccactggaccaggagctctatcagggcaggaagcggcgtccggcaccttctgtggggtagagctgtgcagtggttacaccttgagctcttgagccagggcacgcagggctgactcctgggtcactgagtgagctccagaaatgcgcttagccttcctatgcctcagtttcctcatctctgtgttgtggtttgattaaacgaattaaccaaagcaaggagctcagaatgaggtaattaggaggctctcgtgcgtggatgaatggaggaggggcgggaagtatggggtggggggtggggtcttctcctctcacccgccgttgacccccacgaactggaggctcctccggtgggccgtggggtctgcaacctcctctttccgtttcatgatagatcgcacgcctgccgggggcccgcctggaggggaggacagcggaggtgctgtgagagtccttcagggccagactccgaactggcgccatcccggtgccccgtccctcttggcggccacccaccacttaccggtgcccccggcctcctcggactcttgggaggctgcttgcctggtgggctccctgtgggtgggctcctgggtgggcactcggcctgtgctcttctcaggctgtgtaagggaggctacctcggaccccgggggtgacgaagacgattcggcaggaacttctgggaggcctggagggacaggaaatgagtgtctgctcttggtcataaaagccaaaccaccacagccctgcgggtcatacaccctgggccaggagctgtaacagggctgatttttgtgttaccacatccagtcttcctgccccttggagggaaatcggattattacagatgaggaaactgaggcacagagctgccaaggtaaccccttgagcaggtggcagaatccagtttggtgcctgcccagcagctagtcagggacagggacaaccctgtggccccatattcctggctcgagcctgagtgatcgctaaaaataaggtttggccgggcacggtgactcatgcctgtaatcccagcactttgggaggctgaggcgggcgaatcccctgagatcagaagttcgagaccagcctggctaacatggtgaaatcccgtctccactaaaaatagaaaaattagccgggcgtggtggtgcacacctgtcgttccagccactcaggatgctgaggcaggagaattgcttgaacccgggaggcggaggttgcagtgagcagagatcacgccaatgcactccagcctgggcaacagagcaagaccctgcctctcaaaaaaaaaaaaaaatcagagataaaaacacgtcttggtggccaggcacagtggctcatgcctgtaatcccagtactttaggaggctgaggcgggcagatcacgaggtcaggagttcaagaccagcctggccaacatggtgaaaccccatctctactaaatatacaaaaattagctgggcgtggtggggggatgcctgtaatcccagctactcaggaggctgaggcaggagaattgcttgaacccgggaggcagaggttgcagtgagcagagatcacaccactgcactccagcctgggtaacagagagagactgtcctgaaaataaaaaataaaaaaaaaaaacacatcctgactaaaaaaacgaaacgaaacaaaagaaaacaaaagacaacaaaaaacacccacccaggttggtctgaggacaaaggtgacttcctggatgctgaggtcctggactgccagccaacagcgtggaataaaagtccagtttcctttttgtgtagccaccaatgtcttggaatccactcaggtccccctgggccacatatggctgctttgtaagacagggtttcactcccttcactgaagcttgagtgcagagatgcgatcttggctcactgtaacctgtgcctcccggattcaagtgattctcctgcctcagccccctgagcggcaggcagtaaaggcgcatgccactgtgcccagctaattttctgtaatgtttgtagagatggggtttcactatattgcccaggctggtcttgaactcctgagctcaagtgatccgccttccaaagtgctgggattacctccggagcagcaccgcccagcccatgcatggtttctgtgtcagcatttcctcgggggttccccttcctgtcccccggggcgccaactctgaagaccaattaatttgaattccctttaatggctaaaaaggttgttggggtttttttctttgtgacagggtcttgttatattgtccaggctgctctagaactccagagcgcaagggatcctcccacctcagcctctcgcatagctgggattataggcatgagccactatgcccagccttaaattttttttttttgccatatacagtgacttcctgaggcccacaggcaatattcaactttagtacagaacggtgaccaaatgctggacataggcaaagagtaacatagacagggccggctgcatgagacactcggtcatcggcatggccaacagcatccccagaccagggtgtggccagctcataccacagaaaacataaaaaccatgccagagccaaggcttgaactcatgagtggggaactgagcgagagcaaacgccagttgctatgtccctctatgatttttctttttaaacttggcaataaattcacgtgaaacaaacaaacatactgcatggccaggagacagattcacaatctcaatctctgcccaaaatgcagggcgcctaacttgaaatcctggagaggccgggcgcagtagctcacgcttgtaatcccagcaccttgggaggctgaggtgggtgggtcacttgaagtcaggaattaagagaccagcctggccaacatggcaaaaccccgtctctactaaaaatataacaattagccaggcatggtggtagacatttgtgatcccatctatttgggaggctgaggcaggacaatcgcttgaacccggaaggcggaggttgcagtgagccgagatcatgccactgcactccagcctgggggatagagcgagactcttgtctccaaaaaaaaaaaaaaaaaaaaaaaaaaaattctgggagagccaaaaaatgaggtggagcaatattatgctaagtgaaagaagccagatgcaaaagggacaaaaacattgcatgatttgattcacaggagttccctagagttgtcaagatttattattattattattattattattatttgatacagtctttctccatcgtccaggctggagggcagtggcgtgatctcggctcactgcaacctctgcctcccaggttcaagtgattctcctgcctcagcctcctgaatagttgggattacaggagccaaccaccatgcccggctaatttttgtatttttactagagacaaggtttcaccatgttggccagggtgatcttgaactcctgacctcaagtgatccatctgcctccgcctccgaaagtgctggggttacaggtgggaaccactgcgcccagccctagaattatcagatttaaacagacagaaaatagaatggtgggtgccaggggctgggggaaggagaatgggaagtgtgtttaatggggacagtttcagtttggaaagatgagaaagttctaaagatggatgatggtgacagttgcgcaacagtgtgaatgggctggacatagtggctcacacctataatcccaggactttgggaggctgaagggggaggatcacttgagcccaggagtgtgagaccagcttgggcaacatagggagatcctatccccaacaaatacaagaaaaaacaaacaaacaaaaaaatgatgcaaatgtacttaatgccactgaattacatactcaaacatggataagatggttaatttttttttttttttttttgagacggagtcttgctttgtcatccaggttggagtgcagtgatgcgatcttggctcactgcaacctctgcctcctgggttcaagcgattctcctgcctcagcctcctgagtagctgggattacaggtgtgtgccaccatgcctggctaatttatatttttagtagagatggggttttgccatgttggccaggctggtcttgaactcccaatctccagtgatccacccgcctcagcctcccaaagtgctgggattacaggcttaagccaacacgcccggccagatgccaaattttatgttctatctatgttaccacaatattgtaaatggcgaaaaaatttgagaggctgaggcaggaggatcgcttgaggccaggagttcaagaccagcctgggcaacatagcaagactctatctctgcaaaaaattaaaaagttagccaggtgtggtggagtgcgcctatagttctaactacttgggactatacttggctgagatgaaaagattgcttgagcccgggagtttgaagttacattgagctatgacagcactgctgcactccagcctgggtgacggagtgagaccctatctttaaaaaaaaaaacaaaaaaacaaaacaaaacaaaaaagccaggcgcggtggctcacgattgtaaccccaggactttgggaggccaaggcaggccaatcacaaggttaggagatcgagaccatcctggctaacacggtgaaaccccatctctactaaaaatataaaaaattaggaaggcatggtggcacgtgcctgtagtcccaggtacttgggaggctgaggcaggagaatcgcttgaacccaggaggcagagcttgcagtgagccgatattatgccactgcactccagcctgggtgacagagtcagactgcctcaaaaaaaaaaaaaaaaaaaaaagtaaaaaaaatcaaacaaactagagcagaaccaaagcccactccgccccaacagaaaagcaggcagtgacttcaaaacctgggatggctccttccagtctaaggaattgaaggttagacttggaatgctagcataacaagaagtaataataaaattgatgatacttattattgttatcccactggggaatggggccaactgacactaaaatttacacaaaagaactaaagtccattgataagctaagacaattctacaaaacaagagcacagatggagtagttggtctgtgagagagtaaaacatatttcaaagctacaaccatgagaacagcagggcatttttgcattaataaatggaccaatgggacagagaagacaggctccaatctctgggcactgagggtaagacagagggggtttccccaagccagtgggagacggtggattctgtggtgtggttttaggagaagcagcttactttacatgagaagagccaagctggatctctatctcatagcatacacaagaaagaaactgtgaagaattaagatgaaggtacaactacaaagctaaagggagataatgtagcagactatcagggactcaggaaagggaaagattcattcattcattcattcatccagtgacacagtctcactctgttgtccaggctggagcgcagtggcgtgatcacagctcattccagcttcgaactcctcggctcaagtgatcctcccacttcagcctcccgagtagctgggactacaggcatgcaccaccatgcccagctaattttttttttttttgagagagtctcgcattgtcaccccaggctgaagtggagtggagccatctcagctcactgcaactttcgcctccctgattcaagtgattctcctgcctcagcctcccgagtagctgggattacaagtgcccgctaccatgcccagctaatttttttgtatttttagtagagatggggtttcactatgttggcaaggctggtcttgaactcctggccaatttttgtattttttgtagagatgggggtcttactatgttacctaggctggcctggaactcctgggctcaaagcaattttcccaccaaagtgttgagattacaggtgtgagtcaatgtgcccagttaagattcttttaaaaattcttccaagcacaatccacatatgcaaaatataatggttttacctatattcaaaatgaagacttctggccaggcatggtggctcatgcctgtaatcccaacactttgggaggccaaggtgggcggatcacttgagtcaggagttcgagatcagcctggccaacatggtgaaacccagtctctactgataatacaaaaattagcagagtatgctggcaggcacctgtaatcccagctactcgggaggatgaggcaggagaattgcttgaacctgggaggcagaggttgcagtgagccgagatcgtgccactgcactccagcctggatgacagagcgaaactctgtctcaaaaacaaaaacaaaaacaaaaatgaagacctctgagatcctcatgggtgcggtgggggagtgccggagtttggcacaggcaaaaattggcaagggataatcttctagaacagggtcaacaaacctgggaagggctagatagcaaacatttttggttacgtcacacataaggactcggttgcaactgctcaactgtggcatagttctaacacaaaaccagtcacagacagtatgtaagtgattccgcgtggctgtatccaataagtttgaatttcacataatcttgtcatgtcaagaaatattttttttgagacagggcaagactctactttttttttaatgtgaaaaaaaaaaatcaataaataaactagagcagcgcctaaatcccattctgccccaacagagaagcaggcagtgacttcagggaacttcttttttttcttttttttttttgagatgaagtctcgctcttgttgcccaggctggagggcaatggcgtgatctcagctcactagcaacctctgcctcgcgaggtcaagtgattctcctgcctcagcctcccgagtagctgggattacaggcacccgccatcatgctcggctaatttttgtattgttgtagagatgggtttcaccatgttggccagggtggtctcgacctcctgacctcagttgagccaccacgcccagtctacttcaggcaacttctgttgcccaggctggagtccaatcatagcttgctgcagcctcaaaatcctgggcttgccgggcatggtggctcacgcctgtaatcccagcactttggggggccgaggtgggtggatcgcttgagcccaggagtttgagaccagcctgggcaacatggtggaaccccatctccacaacaacaacaacaaaattcctgggctcaaggaatcctcctgcctcagcctcccaagtagctgggactacagctgcacgccaccatgccaaactaatttttaattagtagagatggggtgtcactatattgcccaggctggtctcaaactcctggcctcaagtgatccttctgccttggcctcccaaagtgctgggattgcaggtgtgagccactgtacttggcccaaaatatatttttaaaatcattcaaccattaaaaaaaaacgtaaaaatcattcttagctgtgggttgtagaaaaacaggtttcaggctgtatctggcccacaggccgtagtttgccagttttgactctggaagataccagcaacttctaaaaactgctcagagaaaaaatggagaaaggctacaagtaattgacttacagaggaaccttattaggcatacacagagaagccctatctctcactgcctatcagagctatgccaatgaaaacaataaggagggctgaattccgaggctcgcatttataatcccagggctttgggaggctgaggtggatcacttcagccctggagttcgagaccaacctgaacaacagagcaagaccccatctctacaaaaaattacctgaatgggatggcacttgcctttagtcctagctactcaggaggctgaggtggagggatcacttgagcccgagaggtttaggctgcagtgaactgtgactgtgccactgcactccagcctgggtgacacaatgagaccctgtctcaaaaaacaaacaaaacaatgaggagataccattatgtagcagctgtcagatggataaaaaaaattagaaagacagggccgggcgtggtagctcacacctgcaatcccagcactttgggaggccaaggcgggtggatcacctaaggatgagagtttgagaccagcctggccaacatggtgaaaccccgtctctactaaaaatacaaaaatcagccaggtgtggtggcgggtgcctgtaatcccagctactagagatgctgaggcacaagaatcgcttgaacctgggaggcggaggttgcagtgagccaagatcgcgccaccgcactccagcctgagaaacagagcaagactctgtctcaacaaataaaaaaagaaagaaagaagaggccaggcgcggtggctcacgcctgttaattccagcactttgggaggccaaggcgggcagatcaactgaggtcaggagttggagacgagcctgaccaacatggagaaaccccgtctctgctaaaactacaaaattagtcaggcgtggtggggcgcatgcctgtaatctcagctactcgggaggctgaggcaggagaatcgcttgaacccgggaggtggaggttgcggtgagccaagatcacaccactgcactccagcctgggcaacaggagtgaaactctgtctcaaaaaaaaagaagaaaaattagaaagacagataaagccatatgttggtgaggatatgagaaaatggacaacttgaaccggagcacggtgttaggagtgcggatagggacagccttttttggaaaggatcagacaggacttggagtgaagttgcaaatcctctaggaatgggcagtcccacagaaggggtcgtgtgaagatgactccagcattgttcgtggtggccggaaattagaagtaaccagatacctactgtgaagggattagagaagagggtaggtgggtggggtggctcacacctgtaatcccagaactttgggaggccaaggcggacagatcatgaggtcaggagttcgagaccagcctggccaacgtggtgaaaccccgtctctactaaaaatacaaaaattagccaggcgtggtagcagggcatctgtaatcccagctacttgggaggctgaggcaggagaattgcttgaacccgggaggcagaggttacagtgagctgagatcacgccactgcactccaccctgggcaacagagcgagattccatctcaaaagaaaaaaggaagaaaaaaaagaaaataaaaagtgataaatcagatttacaaacctcagtgtggagagttcaaaaatagtgtaaggagaggaaaaaataagaaacagaaagagatttttttctgaagcacaacaccatttaaggaaatgaaacacgcacaaggcatatttttcaaggacactcaaatgtctaaataagtttctggaaggtggtttgtaaggaatgggattagatggggtgggggtggcactgacggtggagagcggagggtggtgagcttcagtctgtgggtgctgtttttacatttttaaatggatgggaaagaagaatttaatttgggactcatgaaaagtatgtgaaatagaaatttcagggtcctgcaaataaagttttattggaacgcagccacgttcgttcatttccatattgtctacggctgcttttgcaactgcaaaatgaaggccctgaagcaccaaattcaaaaaggtatacattaaatatgtgcatttttttgcatattaagtatacgtcaataaaatcagaaaaagctgggcacggtggcacacgcctgcaatcccagctatttaggaggccgacgtggaaggatcacttcagtccccgagttcgaaaccagcctgggcaacatagtgagacctcatctggcaacatagtgagacctcatctcaataaaaaggatgaaaggaataaaaataaagtggggaggaaaaaagaactgaggcagagttgaatcaatgcaatagagaccgtatgacctgcaaaagtgaaaatatttactgacccttagcattgaaggttgaaggtggaggctgaaggtgaaaaaataataagtaatacaagagaagtggtctgcacaggctaacgtggatggttgtcaggagctgaggaatgagatgaactcagttttggactcctgaaggccaaaataattttttttttttttgagacggagtctcactctcactctgtcgcccaggctggagtgcagcaatgcgagctcagctcactgcaatttccgcctccccggttcaagcgattctcctgtctcagcttcccaagtagctgggattacaggtgtgtgccaccacacctggctaatttttgtatttttagtaggggtttttgccatgttgcccaagctggtctcgagctcctgacctcaggtgatctgcccactttggcctcccaaagttctgggattacaggcatgagccaccacacccggcccatgtaaattctttttttttttttttttaatttaggctgggtgcggtagctcattccagtttgttcaaccccttgataagcccgagcctttgcttatctcagggcctttgtccctgctgtgctcctccctggaacattgttttttccacctcttctggtgacttctttcatgtcttcattcaaagatgctccttggagggtgggtgccgtggctcatgcctgtaatcccagcactttgggaggccgaggcgggcagaccacaaggttaggagttcaagaccagcctggccaacatagtgaaaccccgtctctactaaaagtacaagaaaattagctgggtgtggtggtgggtgcctgtaatcccagctacttggaaggtggaggcaaggagaatcgtttgaacccaggaggtggaggttgcagtgagcggagatagcgccattgcacaccagcctgggtggcagtgcaagactccatctcaaaaaaaaaaaaaaatgctcctttgagaggctatagggccaagagctgaccttgggcaccaagtatcaaccatgcctggtaccatgatgaacacttgacatgaattgattctctccccccccacccccgcccacaagattggtcttgctcaggctggagtacagtggcgtggtcacaactcactgtagcctcgaccccctgggctcaagcagtcctcctgttttggcctccgaaagctccaggattacaggcataagccactgcgcctggctgaattgacatattaaagcctcacattattccagtgacactgtgccatcaggacccccgatttgcaaatgaggaaactgaggcatagagagatttcatcgcttgctcaaaggccgagaaggttggatcacctgaggtcaggagtttgagaccagcctgaccaacatggtgaaaccccatctctactaaaaatacaaaaattagtcagtcatggtggtgcatgcctgtaatcccagctactcgggaggcggaggcagaagaatcgcttgaactcgggaggcgggggttgcagtgagccgagattgcatcactgcactccagcctgggcgacagagcaagactctgtctcaaaaaaaaaaaaaaaaaaaaaaaaaaaaaaaggaagatatagaaatgaattaagacattccagcttggctcaagcaaggcagagattggggctggctgcagcaagagggaataaaatgagactccaggaagaactttcaggcagcagcttgaatgcaaagaaggtggacatcgctatgtctgtttgtcctgcaggcagaaggcctctcagctgctctgggaggcacgtctggaatggtggttgcctctcagagattccgaggctgggccaggcggagcctctggcagggggccagaacctcaggacctggtgtttgggatagacacagaacaggcgggtggtgtccagagctggccaggaacaacacgggccggcgagaaaacacagctgggtccctgccctccagcctgtgccctccagtctgttggtaggggctctggccacctgacatttgaggctgggatgagaacttgggccctaccttcgagccctgctgcagattcaagctgtcctggttatttatttcttttttcttttcttttcttttttttgagatggagtctcactgtcatccaggctagagtgcagtggtgcgacctcggcccaatgcaacctccgcctcctaggttcaagcaattctcctcccttagcctagctaggactacaggcgtgtgccaacacgcccagctaatttttgtatttttagtagtgacagggtttcgccatattggccaggctggtcttgaacccctgagctcaggttatccacccacctcggcctcccaaagtgctaggattacaggcctgatgttctgggtttggatactggctcagttgagccacttcctggctgtgtgacacaggacaaatgaatctcctccctaagcctcagtttccccaggtatgaacaggttgaccagaacattatcagcagaagcagcaaccagtacttaaccgtgtgcattaattcataaattctccacctctctagaggtggagagcattatcatgccacttcacagatagggacgtttagggctagagaggtgatgttgctcaccagtatcacacagcatgagtttgaacgcacctggcagagcctccctgaccatgtttccagaagaacagctgtcattattattgttgagacacagtttcactctgttgcccaggctggagtgcagtggcacaatctcagctcactgcaacctccggctcccaagttcaagcgattcttgtgcttcagtctcccaagtagctgggattacaggtgccggccaccacgcccggctaatttttgtatttttagtagagacagggtttcaccatgttggccaggctggtcttgaactcctggcctcaagtgatctgcctgcctctgcctcccaaagtgctgggattacaggcgtgagccaccgtgcccagccagctgtcattattattattaattattttgagatacagtttcactctgtcgcccaggctggagggcagtggtgtgatcttggctcactgcaacctccgcctcccgggttcaagcgattctcctgcctcagcctccggagtagctgggactacaggtgtgcgccaccacgcccggctaatttttgtatttttaatagagatggggtttcactgtgttggccaggctggtcttgaactcctggcctcaagcgatccacctgccttggcctccaaagtgtgggattacaggcgtgagccactgcgcccggcccagctgtcattattatgagtcatttgggtggcttctcccagggacctcaggacaacccagcagctgacattctgcacagccggcatcccctttcctggcatgaggactcagtacttcctctgggaagcacccccttcctccctcaaaggccacagggcttgggtggggctcccctacccccggcgtccatggctaggcagacagggacaccgtgattggctcagcaatgggcacatgacccaggccagccaatgagggccccctctgggatttttactggtgctctttggattaaggatctccctctccactaaactggacagacagatgcctggagcagtgaggtcactttcccttgcctgcctgaaagagaagctcccagggaaaacaagaagagaaaggcaccaagttagattcctgatgatatctgagcactgaggccagcgtggtggctcatgcttgtaatcccagcactctgggaggccaagacaggagcatcatttgagcccagaagtttgagaccagcctgggcaacataacaagactttgtctctacaaaaaataaaaaaaattaacgaggcacagtggtgcatgcctgtagacccagctacttgggaggctaaggcgggaggattgcttgagcctaggaagtcaaggctgcagtgagccatgattacaccaactgcactccagcctgggcaatggagcgagactctatctcttaataacgacaacaagaacaagatatttgtgcacctggatccagccatgcctgaagctgtcatcagttacgtaataacacatttccttttcactgcttgaacagctccgagattgattcctgccacttactgaataaacagggaggtttctgcctggtaaaccaacagccttggggaactttcccccaaatacctcccactttctggatactgacaaagtggcagtcacctaatttctctgcatggttgctacagccctgagggttggctgcacaattctcctccttttgtggatgataagacagagactctaagagttggactgatgtgtctggtggaaggtcgggggctggggctggaccttggcattctttttttttttttttttttttgagacagagtctccctctgttgcccaggctggagtgcagtggtgtaatctcagctcactgcaacctccgcttccctagttcaagcgattctcctgcctcagcctcctgggtagctgaggtttacaggcgcacgccaccacacctggctaatttttgtatttttagtagagatgggtttcaccatgttggccaggctggtctccaactcctgacctcaagtgatctgcccgcctcggcctcccaaagtgctgggattacaggcatgcgccaccgcaccctgcctggaccctggcgttctgagagtccaggatgagccatgggaagaaagaggccccccccccccaagccattctcccctgcctgcctgcgaccgcttacctgctgctccatcgcagcttcgctctgtgatgctaatcttcttcaccatatggacgttgctggtagctgcagcgggcactgggcacattgtctccaccacctcctggctgcggaacacaggtgggctctcaggcctaccaggcattgccagggccctcagccctgtgccgtaaggctccaggctctgggcccgctgtgcgggggcgccagcggctgtgctggccaccacctccacctcccgtggcccttctaccacccggactgtatccacgcggaccgggctgtccggcggtggccaggcctggggctgggggtcagcctgccgggcctgagctgcctgcagctcctgcagcgccttcttgagctgggtctccagcacagcgaccttggcggcgagggcagcctccccatcaggcatgcccaagtcccgttctcgaacccaggtgcccacactccgggtctccagtgccactgggtcctctgggggatcggggaggtccaggcagagctcgctgcgaccccggcccgctgtggggtggcccaggaacttctggctcttaagttgtactgtgagctgccgcttttcctcctggagcaccgagagcttcacctggagcacagggatcagcttcacctgctcctccagctgccgcagcttccgcagggcacccgccatctgctcccgcacgtgggccaggtgcccggcactgggaggcaccggtgtggacagtcctgaactccgtggtgtcgggggtggcaaccccacgcccaccagggaggctgtcgagccggccgcactgggggtcagggagcccaggccggtgggtgtggccgcctggtcctcgagacggcgacgggcatccagcagcgtgcgctccacccgcggattgaagccaccgcgggtctccagagcaccatactgagggtagaagccacggccgcagtaggaataggctgagtggcggctgtccccactggcattggagcacagcgactcagtggacgtccaccaggagccagggccacggggcagcgagctcaggcgggggcggcgctgcactgccacgcgtcgcagcgtgtggcccttctcgatgtcatccacgtacttgaggaagtccaggtccaggcggtagccatagggggtctccacggagtagggtggatcggggtccttggcagggaaggcaggtggggaggctgggccaggggtccctggggatgggagaaacaccaggacctttgaatcctcttgtccccattctcagggtgaagactgatgcctggggagagttggggtttatttgccgaagagatgggagcccacctggtactcaaccgcgtctgctctcagaccctccagagcagggctatgcctccccttcagactcccggcgctaggctatgtcgcctctcaaatcccccaggacagggctctatccctcggcttagactaccccctttttccggtaagactctgcctcccccttcagaccctcccagggcaggactctgcctcctccctcagacctctaattgttgggctgtgtcccaccctcaaagtccccagggcaaggtccccagccccctcaggcctccagaactgaagctccccggggcagggccctcttccctgagtcccctgacctgggaagggagcaggcacgtgcaggacctgggccatcttcttttctacagatgctccttggaagtcacttgagggactgcgagtcagactgcctgcagcaccggctgaggcttacctggggaaagagaaccacggcgccgggagttaggagtctgtagggggaggggaggagatgaggccagccccctccacagctggttcacccagccccccaacccaggtctgggacccactcatagacgcacacccagcctggctgcggaagggccccccccgaccccctcccccccgcaggtctggaacaaagaaaccaaacctcactgcctgcttgcacatctgtccaggccctggacaggctccagctgttcccatagcccagcctccacatagccctggggctggggggccccaagcccaacaggccccacccttcctgcaccccctcccctcagcccaggcccggagctggccacacggaaggatgggggttgaggcgctaaggggttggggaagaagggaacctcgtcttcctgcaaggatctgaggagacagagacgcagggggacaaagagaggcaaagcatggcgaaggggacccccagtgaccccaaagctgagagctgggtcaggcctggactgggtcggggggaaggggtagggaaagttggggaggcagctaggagtgaagcctttcccctttatggaaacaattttctctaaaaataaacagtttcactgccgggctacacagaacttcctgcccgcctaggatgcgtccgggcccaggggcgcagtagggatagagggccgggtggaggcccaggaagtcctgggggtggaggggaggaagtaagagggggcgcctggaggctgcaaaagggagggacagtcagagcctctcactaaacccccctcagccttggaggccggccagggctcttttgtccccaatataacccatctgaacttggctggtcctttctgttatctgacctccagccatcatgctgcagaggccccagcccatcccaccatcagagtaaatcctttctggcctttgagtgctggggccggcaggtaccttgggaggatgggccaggtagggcacctgctgggcatgaaggcagggctggggctccaggggcacctgagcttgtccttgttctcccgtcctgtcttgctttgtctctctccaagtctctctgtgtctctccacgtctctctgtgtctctccacgtctctgtctctctgcgtctctctccacgtctctgtccttctgcgtctctctccgtgtctctctccctgtctttccacgtctctgtcttcgcttctctgtctttcaacacctggaacacatggtcaccaattgcaggaaattccgttttccatttgcctggaggctcacccctgagcaacagaaagttgattgaaaatattttctggccaccaaagagagatggagaagcagggagcaagcgggattggagcaggattggaatagccgagcggggtgggctgggggtgggggaagtgagggtgctgctgggtaaatagtatagtaacagtaatactaacatcaactcttttttttttttttttctgagacggagttttgctcttgtcgcccaggctggagtgcaatggcgcgatctcagctcacggcaacctctgcctcccaggttcaagcgattctcctgcctcagcctcctgagtagctgggattacaggcacctgccaccacgcctagctaattctgtatttttagtagagatggtgtttctccatgttggtcaggctggtctcgaactcctgacctcaggtgatccgcccgccttggcctcccaaagtgctgggattacaggcatgagccactgcacccagcctaacatcaactcttttaattgtcatgacaattctatgagatgggcacttatcgccccgtttcacagacaggggatgcagagggtacagaaaggtacagtggcttcctcggggtcactggggccatggggaagtggctgggcctgaacatgaacctaagcctggtggatccccccactgcccaccaagccaccaccctcagactccacatcagatatctctacccgtttcccagatacggagactgaggtctgagggtactcagtcatctcaccgccctcgatgaggaccagcacgtcccgagtaaggggaagagaaaggagacgagggggtgtggtgggggagatggatgtctgtggctgagacccttctctcgccatgggacccctggggaatggggaaggggtgacaggataagacagagatggagagactggagcctataagaggggacaggtagggagcgcagggaaggggcgcgggtctccccaacccaccacccaagaccggcctgcacatcgcggaggtcggtggtggtggtgggggggggtcttcccgccccaaactcggggtggggggaggcgagaaggaccccgccccgtgcagagagggggcggggcctgtgggatcccgggctaatggcaaacagctgccgctccccacgccggcccagccgccaagcccaggcccagcccggccggacgcccggccgccttcccgccgtctggggcatggccgcggaggagggcgaggggggacagtgcggggagagggcagagccggggaggaacagaggcagaaagtgggacagagacaggggagagcgggcagaggggagccaagacaggagaaacgggcagggcacgaggaatcgatggggggtactgggaggaatcgatgggggtatggggtcaaagacgaggagggggcagggacgcggggacagacactccaagtctggaaagtttgggcacagaaggtggagttggaggcagcggctcgttgagaccagcgaggtcgtgtcccagggttggaggcggggggtagggtagtaggtgtgtgtggagggggtgcacactcgatccccgaaccagacttgaacccctacccagccccgggtcccactcgccttgcgcgctccggccgctgccttccctgggtcccgccgcccgagcgtcttcgcgcgcgccgcagcctgggcgcccggccctcggaggtggctccgcccgcaccacgccccctccggctggtcccgcccccccagccggcaccgccccctccagccgcccgggcgccccggccgcggtggggggtggggatggagagacgctggttggagactggatctcacctggacagcaggtgtgtgtgcgcgccggggtgtccggcctcgtccttccttcctccctaagtccccgaggcagggtcctcccactgccggcctcccccccaccgcctgctgtccctgggccgctgcggggggcggaacggctcggcggcgggagggggtggagctggccggggcccagctcggggagggcgcgcggggcgggcgcggcagcgggaggtcacccctcccccaggcggcccagggctggaagcggcccagcgcagtcctggcacacggtggcgtgaccgccgcgcgagaagggaggctgcagagtcctgggcgccggcgccagccagacctgcattcccatcccagacccaccaaacttttgctgctctgtgcctcagtttattcatctgtaaaatggagatgatcatgttagctacctgataggagcgttgagaagattcactgaccattaggaaggggcctaaccatcaggaaggaggcccttcgggttaaaaactctcataaatggagtggcctacttttgcagagatctttctgggagcccttttagtacacagccagccactcagcaagggcttaataaatattattaagccggcgaggtggctcacacctgtaatctcagtgcttagggaggccaaggcaagaggactgcttgaactcaggagttcgagaccagcctgggcaacatagcaagaccctgtctatgcaaaaaaatttttaagtgaaaaaaaattaggccaggcgcagtggctcatgcctgtaatcgtagcactttgggaggccaaggtgggcggattatttgagccaaggagttggagaccagctttggcaatatggtaagacgccatctctacaaaaaacaaaatacaaaaaaccacctggggccgagaaatggctcatgcctgtaatcccagcactttgggagtccgaggtgggtggatcatctgaggtcaggagttcaagaccagcctggccaacatggtgaaaccccttctctactaaaaatacaaaaactatcctggcatggtggtgcacatctgtaatcccagctactcgggaggctgaggtatgagaataacttgaatctgggaggtggaggttgccgtgagccgagattgcaccactgcactgcagcctgggtgacagagtgaaactctgtctaaaaaaaaaaaaaagaaaaagaaaaaaaagccaggcacagtggcatgtgcctataatctctgctactcaggaggcttgagccccggagtttgaggctgcagtgagctatgactgtgacactgcattccagcctgggggactgagtgagagcgtctgttaaaaacaaacaaacaaaaaccaggtattgttattgcaggtaagcatgtgacattatttgtgtgttgccttccctactagaacatcagctccacaagggcaggaatttttgcctgttgtcaccacgatgtccctggcacccagtatgttcttggtgtccccattgatgatgcagggatgtgtggatatggggcagtggactgtgagcatgtgatgagcatgtgacccagcccctagtgaccgcaccacatggcacaggttgcttataaaaaccattttaaattaaaaaagggaggaagcatcagtgcacacagatggggacacaggggcagagggcccagccccaagtacagtgtggtcaccccacagcccagtgggcaccagggcagactcccctcgcagcacagacagctgaggcccgggtgctggttcctctaggtacagctttggtccttgtgggctcagaggtctgcctttcggaaacttgctctgttcaaggagttcctggaaaaagaatgagggtgggtcagcatggccatggggcccccaactccatagacctcccagcccacatcctcttcctcctcctcctcgtcttcctccaaggatccttctgggatctctcctgtccctgatctggctgtgggattctccgattctctcttgcagtccaccacggaaggtatgaatcatccccattttacagatgtagaaactgaggctcagaaagatgaattcatgtatctgggaaatgactgctcagagcctgccctgcctttgtacatctggatgacatattcagatgcttatgcaaaattgaagccaccgcagccaggcgtggtggtggctcatgctgtaattccagcactttaggagggcaaagcggatggatcacctgagatcaggagttcgagaccagtctggccaacatggtgaaaccctgtctctactaaaaatacaaaacattagccaggcgtggtggcagatgcctgtaatcccagttactcaggaggctgaggcaggagactcgcttgaatctgggaggcggaggttgcagtgagccaagactgtgccaactgcactccagcctgggcaacagagggagagtctctcaaaaaaaaaaacaaaaaaaaaaccggaaacaaaacaaagtccaagctaccagcaaacatgttgctgtgtatgtgtacaacagcccccatcctgtacctgtcctggtctgcctctgcatcccctctctagtctctaggatgggggcactaggtcaggcacctgaggccgggtggggtgggtgccatcagctggggcaggcgctgggtaagcaggggctgcagagcctcccgcaggcggcagtagttgcgctccagctcacggtggtactccttctggtccggcccaatcagggccttatttttccgcagcgcatcctcacatctgagggccagagggtgggagatgctcagagactcgcacacgggactgaaagcaagactaggggtgggggcacccataaggcgggaccaggcctgcagaaagacccgcaataggaggtcaggttgggagagtggacttaatgggaatcgggcagatgggggagccatgcagagatcagatgggcagagagcaggcctatgcaggttaggcagacacgagacccctcctggggggttttgcgcctacttcttgcagaagtccttgaagcagagccgcaatttgttgtgatgccggaagagcttggggtcttccgggatctctgctaaaaacacctgggccacctccaggggaccctgtggggtgagagggactggtgagccagcctgcatggcacctggagtcccccgtgcggcttgcatcccccttccaccagccgtgcctggttcacggtgggccctacagagccctgaagcaccatctgtagcatcttagcatctggtgggtcctgctcggtggcaaaggccagctcccgtgtcttcttctgcatgtcctcgatggccacctccactggcgtcagcaccgtctgtggggtaaggggaggggtgtgtactcgctggggcctgaggaggtcctgatcgaagccagtcgggggcagctcagaccccgctgggagtgagaggggtccaagaacccaggcaatgaacagaatctgggggccttcctgggtctgactctgggggggtccagccttgggtctgctgggtctggtgccctggggtccaggggctttacctctggggtctccagacttccttgggtctggaggtagagatttggactggaagttggagtttggggtccccaacctggttctggggtacatgagccaatttctgggtctagcgtgtccacgcctctcctctctgggtctggaatccctgggcttctcctccctgggccttcttagatttggagtccctgtgcctcccctttgtgagtctagaatccctgggtcctcctgggtctggaggtagaggtttcagtttagagattggaatgcagggtctccatatcttctcagcccagttctggggtacctgggcctcttcctgggccacacctctcctccctgggccttcctagatctgggctccctctgcctcctctttctgggtctggaatccctgggccaccctgggtctggggtccctgcatcttgcctcccaggtctccctgggtctggtctcctcccctcccctccctggggatctggtctagggtccctgtgccacccctctctgggtctgaggtccgtgaaccaccttgggtctgggtccctgtgtctaccctcccctcccctcccagggtctgatgtcccctcacctccccacccccgccaggcccaggatccccacccacctcctcccggtggcacacacggatgcgagtcttgatgtaggggaaggcgtggtcggtgctgagcagcgtcttacgcttgtgttgctcgggcagctccccgtgtgcgcgcccatccggcgtgaacggcgtgcagaacaggaatgtgcgaagcccatagttgcggtcaaagtaggtcacccggtccttgagctcgtaggtatcaaagtacggttccacatacgtgatctggatgtaggcctgggcgcagggtcaggtgtgaggatcccacagccccagcacgcacagcccaagccctgttcctggagagaggggatctggggactttgtcatttccaagtcttcctatgtctggatgtttgggaatcccctgaggaataggttttggggtccctcagtgaaatatgatttggggtttcccagagaaagaggatttgagggtccccaggaaacagcacttggagtctctgtgaatctaagattttggggaaatggttgggggacccaccttttgtgagtcaagcttggacttgtccacagggttagagtctttgataatctcaacgacgtcgtcgccaaatctctccgtgtagaactcctggagacacagggctgactcggggccacccagggacagcccctactccagccccaaggcagccccatgccccgttccacccccaaccacaaggacgtgcctccagccggtgtgagatctctgccagcttcgtgatcgatggctccttgtacacaaactcctgctcatccaggtcaccgaagtgggcgccgtagaagcccacgcggaaatacgtcccgaacacgcgctggggctgtgagaaagggtgtggttgtccgggaggcccctgctggaggtctccctgccccagagataggtgtctcgaatatcaggatgggagtgtgaggaccccgagaacatcagggcatgggcacaggcagggggccctgagaacattggggcatggattgcaataggaagttaggactggggctgtattgtttacgggtgtgtccctaatgcccgtgggacagggtatacagcaggtacccaatacatgcatagatggctgaggagagggatggctgtctctcactctaggatggaggctctgcctcctttgttctagggcattctccttcctgtgccctgaggcccacaagaatgggtatacagtaggtaccccataaatgcttggatggctgagggaagggatggctgtgtctcactctaggacagtggctctggttcccttgttccatggcattcccctgctcctgtccccagccctaagtttggaagaaggaaccccctccctaccaccctaaaaacaccaccccatgactggaaaggaagtagaatggctggatgttcacttaccaaggccgatccggggaggatggggcagacatggtggggccagaggtgtgggggacagagagacaatgtcatgggagaggtcagaggtcagagttccctcaacccccagggtcctggttaacactgccccgtgagaatcattccgtggggggagagatcagagacgggaggggggcgggggcgaagaggacctgccctccccacccagctcccacccagcctgcctgcctgggctctgggtttctgccatctttggccagaacattctccccaaactaggagatgcctaaaaatagacctaagcagggaagaagcgggattcgggggggctggagcgggaggacacattaaccagaaatgaggagcagagagcctgggggaggctggaagctgggtacgcagggagagacagagactaagagacagtgagataccaagatagggagagccacgtgatagactggggagagatgagaaagagaccaagagaccatgagggagtcaagagtcaccccgccacccccctgcagtgaccaagctggccctggcagagggaggggtgtctctggagagctcccagctgggtgagtcacaagctgccctcgagatctggggcggggggtgggggcatttttggggaagggagggaaataatggggtgggtcccttgtggccacagccccagccccaagggccagcggccatgctcctctggtgccccctggtgttcactgatggctgctggccagtcatcacgggggtcccagaggcaggtggctgtccaccaaggctgactcacctcccagccggaactctgtggggaagagaagggtcaaggtcagcagatccctggggatgaggagtggggatgaggagtggggctgagggtggggtctggggagggggtcctgggcccacctggtgcatgatcttggtgaaggcctcctgcagtttgccgtgcaccgcggccagcttcttgtagtcacggtgggcttccaggatggggatgaggttcttgtagacctcattcaccgcctcgtagagcccgccctgagggtgaggtggggtcaggattccccaaactgtcttcctctctccactgtgctcctgtctacccatctcccttgtgagcctccgtgctcctacccaccctccatcacctcctccaggaagcccaccctgaccacccctatcccagataggggttgagcctttccactcagctcccacagagggctccatggtcttcactgctacttatcttttttgtttttttgagatagggtctcactccatcacccaggctggagtgtagtggtacaatcatagctcactgcaacctccaactcctgggctcaagagatgctcccaccctagcctcccacatagctggaactacaggtacatgccaccatgcccaaataattttattttagtttttgtagagtcagggtctcactatattgccctagttggtcttgaactcctgggctcaagtgatcctcctgccttggcctcttgattagctgggattacaggtgtgagccaccactctcccagcccttcaccacttttagcaagaatattctatggcacaggtacgatgtacatctgcacttcacccatctgtcttccctcattgatgggagaagcagtttttttttcctattcctcaaagaggaaagtgagtctcagagacagaggcattccccagggccaagacccaaacacccacccatctggccctgtgcccatgacctccatgcccaactgccttctggcatgtggtaatatgcccctcacccccagcgggtgctggcatcaagcctggctcaaaacaggcatcctgtgaggtttgctgactgtcagaaggcctgtgtccaccccctggtttcttcccctgaggcttttgtgtgtgtatggttttttttcgtaatcttttttttaatactttggggtacatgcgcagaacgtgcagttttgttacataggtatacacgtgccatggtggtttgctgcacccatcaacctgtcacctacattagatacttcttctaatgctatccctccccttaaccccacccgtgtatttttttttttgagatggctgcagtccagtggtatgatctcggctcactgcaacctctgcctcctgggttcaagcaattctcctgcctcatcctacttaatagctgggattacaggcatgtgccaccacgcccagctactttttttgcatttttagtagagacggggtttcaccatattggccaggctggtctcgaactcctgaccttgtgatctacccacctcgacctctcaaagtgccgggattacaggcgtgagccactgcacccagccatatttgtatttttagtagagatggggtttcactatattggccaggctggtctcaaactcctgacctcgtgatccgcctgcctcggcctccaaagtgctgggattacaggcatgagccactgcgcccatgcccagctaattttttgtatttttttttttttttgtagaggcagggtttctctatgttgcccaagctggtcttgaactcccgacctcaagtgatctgcccgccccggcctcccaaagtgctgggatcacaagcgtgagccaccgcacctggcccttcctctgaggccttcgtctccaagaatccagcaaagtgacaataatgaaaataatgtcactaaagggccagcaccacagaagaaatctcactggaacacctgacttcaagtgtgaccttgaatctcactgagctctcaaatgtaactgccagttccccaaaatgtgaggaactgagaaacaggtaaaatgacatcacatggacacagccagccccacacaaaccagaaaaacacacggagcaaaggccccagggctcctgcaagttaaatgtagaaaccaccaactgccctcatacaaacaagcaaactagagaagaaaaccccttttccacagtggaaaatcagttgccgggcatgctggctcacgcctgtaatcccagcactttggaaggccgaggcgagagggttgcatgagtctaggagttcaagcccagcctgggcaacatagcaagatcccatctcttaaaaaaaaaaaatgaacgaagaaaaaaaaattagttgggtgtggtggtgcgcacttatagtcccagctactcaggaggctgaggtgggaggatcacctgagccgaggacatagaggctgcagtgagccaggctgcactccagcctgggtgagagagtaagaccctgtctcagaaaaaaaaaagaaagaaagaaaaaagagacttaggatacagatcagcgacagccattgtgggcccttaatggatcctgattcaaaccaagtcaccccagaaaagatacatcagagatcatctgggacatctaaatatagagtgcaatgaaataaaggatgaccattaacttggccacgcgggataaaagttttataaaagggtctttatcaggaagggttgcacagggggtacttgtgggagtggtgggaaaatagctgggatttgtggtggtttttttttttttgttttttgtttttggagacagagtcttgctctgtctgtcaggctggagtgcagtgggcatgatctcagctcactgcaacctccgcctcccgggttcaagcgagtctcatcccgagtagctgggattacagacacctgccaccatgcccagctaatttttgtatttttagtagacatggggtttcaccatgttggccaggctattcttgaactcctgacctcgtgatccgcctgccttggcttcccaaagtgctgggattacaggagtcagccactgcgcccagcctgggatttgctttaagctggagcttctccaacttgaagatgcatgcgaatatcccaaatctttattttatttattttttgagacaaggtttcactctgtcacataggttggagtacagtggcacgattacaactcattgtagccccaacctcctgggctccagtgatcctcccgcttcaagcttcctgagtagctgggactacaggtgcatgccaccacacccagctaatttcttgtatttttttgtagagacagggtttgccatgttgcccaggctggtcttgaactcctggcctcaagtgatcctcctgcttcagcctcccaaagtgctgggattacaggcatgagccactgcacctgactcatttttattttagtatagaaagtttcaagcattgctgggtgtcccagctacttgggaggcttgggtgggaggattgagtgaggccaggagtttgagaccagcctgggcaacatagtaagactccctctctatgaaaaaattaaaaattggcagggtgtagtggcacaacacctgtaatcccatgactttgggagtttgaagcgggcagatcacttgagctcaggagttcaagaccagcctgggaaacatggcaaaaccccgtctctacaaaaaaatacaaaaaattagccggacatagtgatgtgtgcctgtagtcccagctactcaggaggccagggtgggagaatcacctgagccctggaggccgaggttgtagtgagccatgatcacgccaccgcactccagcctaggtgacagaatggaggtcctgtctcaaaaaatatcacaaagaaaaaatatatataataatttaaaaattggccaggcatggtggcatgtgcctgtgttcccagctacttgggaggctgaggtgggaggattacttgagctcaggagttcgaggctgagtgagctacaatcacaccactgtacaccagcctgggcaaaagagcaagactctgtcaaaaacaaacaaacaaaaaaacaagaaaggaaaaaagaaaagaaaggaaaattgaaagcatctctaatgtatgtaaggcttgctatatcaggcctgcatcaagggtctcatggagacataggcaaataacagggcctctgagaaacccaattctccttccttttttttttttttttttttgagacagagtctcactctgtcacctaggctggagtgcagtggcgcaattctggctcactgcaacctctgcctccctgggtcaagcgattctcctgcctcagcctcccgagtagctgggattacagccgtgcgccaccacgcccggctaatttttgtatttttagtagagacagggtttcaccatgctggccaggctggtctcgaactcctggcctcatgacctgcctgcctccgcctcccaaagtgctggggttacaggcgtgagccaccgcgcccagcctattctccttctttctaaatcccctgctggaagggtctaggaagcagatctgatggcacctccctggcccgagccccctctcctgcacccagtccccaaggcctcaccatggtgaagtagccggctgcctgttccagcaaccctaccagccccagctcagtgaagtgcttcccggagcagaagccctcctcgtcgggcgacaggatgtcgtcggagatggcggactcctctagcacgttggatgagatgttctggggtgggagaggtggcgtcagaccctggtccccactgcactcgtgccgtccgccacctgccaacccctggccactcacctggaaggaaacgcagcccacgggcaggtggcggtggtcctcgagcagggcgaggtactcagccacgagggcggccgcgtgcaccatgcactgggcggcctcggcgtggttgcccagctccgcgtgcttcccggccatgttctgcaaccaggtcagccgaaggtccggtgagccctggtagccccgggcaattctggagtccaggtgaggggggatgtgaggaggggactcacctggtcctccccacctgcctcccacttgtccattctcttcactggttacccccatgtccgccccaaggaccagccaatctcctcacctgtaccccatcccctcactcattccctcacctggccatccctcatctatctccccacctgtcttccccttcgcctattttcttacctgctggccagtcatctgtcttcacctgtctcctcccctgcctaccttacgtattcctgtagtcatcttcctcctcacttgtcctgctgtctcccactgaccagccagtctcctcacgtgtatcctactcacctgtctatcccctcacctgtccaccccctcacctgtccgtcccttcacttgtctatcccctcacctgtccaccctctcacctgtccatcccttcacctgtctatcccctcacctgtccaccccctcacctgtccatcccttcacttgtctatcccctcacctgtccaccctctcacctgtccatcccttcacctgtctatcccctcacctgtccagcccctcacctgtccatcccttcacttgtctatcccctcacctgtccatcccttcacctgtctatcccctcacctgtccaccccctcacctgtccaccccctcactgtccaccctctcacctgtccatcccttcacttgtctatcccctcacctgcccaccctctcacctgtccaccccctcacctgtccatcccttcacctgtctatcccctcacctgtccaccccctcacctgtccaccccctcaactgtccaccttctcacctgtctatccccttacctgtccaccctctcacctgcccgccctcacctgtccaccctctcacctgcccatccctcacctgcccaccttctcacctgtccaccgtctcacctgtccaccctctcacctgtccatcccttcacttgtctatcccctcacctgcccaccttctcacctgtccacctctcacctgtctatccccttacctgtccactctctcacctgtccacccctcacctgcccaccctctcacctgtccatcccttcagctgtttgtcccctcatctgtccacccctcacctgtccatcccctcactgtctcttcacctgtccacccctcacctgttcatcccctcactgtctcttcacctgtccacccctcacctgttcatctcacttggccatcccttcacctgtctccttatctgtccacctcctcacttgttcatcttctcatctggccatctcttcaccagtccatcccttcacctgtctccttgcctgttcaccccttcacctgtctccttgcctgttcaccccttcacctgtccaccccctcacctgtctatcccctcacctgtccaccccctcacctgtccatcccttcacctgcccatccccttacctgtccaccccctcacctgtgcatcccctcacctgtccatcccttcacctgtccatcccttcacctgtctgtcccctcacctgttcaccctctcacctgtccattccttcgcctgtctatcccctcatctgtccacccctttacctatctacccctcacctgtccatcctttcactgtctcttcacctgtccaccccctcacctgttcacctcacctggccatcccttcagctgtctccttatctgtccacctcctcacctgttcatcttctcatctggccatctcttcaccagtccatcccttcacctgtctcctcacctgttcacctcctgacttctttacctcctgacctgtccatcccctcacctgtctatcctgtcacctgtgtcctcacatgtccaccccctcacttgtgtcctcacctgtccatttcttcacccactcacctgcctgtccaacccttttcctgtcttcccacttacctgtctcctcacccatccatcctactcacctgtctcctcacctatgcagcatctccccgcttcctctattcacctgtctcctcgcttatccaacccctcacctgtctatcccttcacccccctgccccaccttttcatttctcacttgaccctccgctcttgagttgactctacctgtggaaacttgagtcacctgaactcactatttccccttccttgtgcaccatctcacttgtctatccacctatccctcccatatgccccacctcccccatctccatcacccgtccgcctctcctacactcctcaatgggtctactctctggatctcatttcccttcacctgtaagcacctcacctgtccccctcacctgtcctggctctcatctgtcatcctcatcagtacattctcctggcatcctctttacctgtttgctcatctgttctctccttacttgtgccctcatgtctgctcacctgtccccctcacctgtctgctcccctatcccccttacctgtctgctcccctgtccccctcacctgtctgctcagctgtctgctcacctgtccccctcacctgtctgctcagctgtctgctcacctgtccccctcacttgcctctgttagggactgtatgctcccctgctccctcctcacctccttagacatctactctcatccctgttctccctgcacctgttggggcgtgggcgtggctgaaggtgccagctggcccacctcacctgtacatgaggtcgatgagcatctcagggtcctcctggtgttccttcatcttcaccgtgtccgtcaggatcatgtgcaggttgaacatcaggtcctggacctggagccggggaacgtccaggggccaatgagagcattaggaagtgaagggagccaaggtggtggggttgggagttatatgaaggggaggcggggcggggacccagcaggtgtcacctgctctgcgaaggtgctgtcccgcagccccatgtcctcctcagcataggtgaggatggttttgagtgaacgtcgcaggtgctcttcactgaagttctgcgtcgtccccaccagggacgagagagacatggtgacctgcatcttcacacgggcaaagttctgcagggacaggggcgggagggtggagccgggagtctcagaccccagaccccacatcagagtctgctcaacctgccgacatggcccttgcgttctttattttttttgagatgggggtctcactctgtcgcccaggctggagtgcagtggcatgatctcagctcactgcaacctccatctcccgagttcaggcaattctcctgcctcagcctcccgagtagctgggactgcaggcatatgccaccacgccctactaatttttgtatttttggtagagacagggtttcactgtgttggctatgctggtctcgaactcctgaactcaagtgattcacctgcctaggcctcccaaaatgctgggattacaggtgtgagccactgcgcccagcattttttcttttctttctttctttctttttttttttttttgagactgagtgtcactttatcacttaggctagaatgcagtggtgcaatcttggctcactgcaacctccgcctctcaggttcaagcgattctcgtgtctcagccttccaagtagctgggattacaggcacccgccaccatgcccagctaatttttgtatttttagtagagatgcggggttccatcatgttggctgggctggtctcgaactcctgacttcaagtgatccacctgcctcagcttcccaaagtgctgagattacaggcatgagccactgtgcctggcccttttttttttttttttttttttattgagacaaggtctcactcttgctcaggctggagtgcagtggcacagtcgtggcccactgcagcctcaaactcctggcctcaagtgatcctctcacctcagcctcccaaagtgctgggattacaggaatgagccacggcacctgacccccaattgcattctgagccctcctcctgctcattatgctcaatgactgtctccccctccctcactccctgtatggttgagaccccactggccaccctgaccagagccatgtgtggaccatgcctcctagcccccactcacgtggccgatctcgaagttctgtcgcatgagcaggtacagcgaggcgctggcgtgcgtgcggatggtgctgatgcggctgccacagtgtcgtaggagcctcaggcacaggtcggcacacagctccgtgtcctcctcgaacagcagctccgggaactgcccccaaggacccagacagacactgtccagcccctccccgttctggctcagaaggggactggcccaaatgaggactgcttgggcaggggtttgtgttctgtcctctttggccaagtaccactgggttcggagtcagacctgggtttaagccccttgctgtgtgaccccaggtgagtgacttggccactctgattctgccttccttccactgtaaactgtggcaaagcagtcagctccatggagttgcagagcacacagtaagtgctcaatgaatgagctccttttttttttttttttttgagacggagttttgctcttgtctcccaggctggagtgcagtggcacaatcacagctcactgcagctttgaactcccaggctcaagccatcctcctgcctcagcctccctagtagctccctagtagctgggatctcaggtggtgtgtgccatcctctctggctaacattttttttttttttttttgagacaggctctcactgtgttgcccaggctggagtccagtggcacgatcatggctcactgtaggcttgacctcccgggctcaagtgatcctcagccttccgagtagctaggaccacaggtgcatgccaccacactcagtttatttttttgtagaaatggggtctcaccgtgttgcccaggctggtctcgaactcctaggctcacatgatcttcctgcctcagcctcccaaagtgctgggattacaggtgtgagccaccgtgcctagtcctagctaatttttaatttttttgtagagacaggggcctcactatgttgcccaggttggtctcaaactcctggcctcaagcgatcctcccacctcagcctcccaaagtgctgggattagaggcatgagccactgtgctcagcctagagctgctactgtttttctaagaatcatggttgttgagtggtgctcaccttggacacaagggccctctgggtggccaggccatgctgcaagaagagggcactctgggcactgcccaggctgtacagcacaaccttcagcactgcccccaagacgctctcccgggcttctgaaagcatcaccgtctggagggaagggggtcagaaatccaggtgttagagcctagggtggttatggggaaagggaaggagagggattatggagtcagagaccacagggcactgcagttgggctcagagcacaaggcagatgctggatcaagccctacctgcacgatgatctccagtgtgtccagaaccactaggcttgcctcggttgccaggttcccttccaccaaggcctcgtgttccatttcatccttggtcctggaaggggaaaggaggtcttgggggcccactcggggtgagatcctactccatggctgagctctctccttcccctggcagcccagggggcactggctccctggaagctgttctgttttttgtttttgttttttttgttttctgagacagggtcttgctctgttgcccaggctggagtgcagtggtgtgatcaccagctcactgcagcctcaacctcccaggctcaagtcattctcccacctcagactcatgagtggctgggaccacaggcacatgccaccatgcctggctaattttttttttttttttttgagatggagtctcgctctgtcacccaggctggagtgcagtggcgcgatctcggctcactgtaagctccgcctcccgggttcacaccattctcctgcctcagcctcgctagtagctgggactacaggcacctgccaccacacctggcttattttttatatattttttagtagagacaaggtttcaccgttagccaggatggtctcgatctcctgatcttgtgatccgcctgcctcggcctcccaaagtgctgggattacaggcatgagccactgcgcccggcccatgcccggctaatttttaaatttttggtagagagggtcttactatgttgcccaggctggtctcgaactcctggactcaagcaatcctcctgcctcggcccaaactgttctgaactcagcagacaccctcctgcccacacctacttgtccacgcggtctgaggtttgcttccagtgtgtgacgctcttccgccagcgcacattctccggattcccaaacgggctcctctctgagacgcgtgggtgcacgatcacagatgcgtaaaaacacagggcacacgtgaacatcaggagaaatgcacaggcatgaagatattcaggtgggctgacccatgagggcactgggtggagcagaagcctgccgggtggacgcacaggggcaaacacgagtgacagatggggacgcacaggcgcatgtgtacggtgatgatttgtggacttctctccaggaaaagtgaggcagaaagtaagctagggatggcccccttcatggggtccccttgacacaaggtgggagcagctggtgggatggggacacgtgggtatgtcaccctcttaccacgacttcgccgaaccatttcttgtcgagctccgatggtacccagaatggcttcctctagccgcgccttcatatccagagattttttgaatgtgaggctgttgatgcgttcaaaggcctttttcccctgggggtgcagagaactggggttccaggctgactctgctcttttcggggggacctgggctggccccatccctttctttgtgctctttctcacctccgggcccctgtgcttaaagacagattgcctttttcctctaaattcttagcacttaccaaaaaaaaaattttttttttttcttgaaacagagtctctctcattctgtcgcccagggtgaagagcagtggcatgatcttggctcattgcaacctccacctcctgggctcaggcaatccacctcagccacttccatagctgggactaccagcatgtgccaccatgctcaggtaatttttgtatttttcgtagagatggggttttaccatgctgcccaggctggtctcaaactcgtgggctcaagcagtttgcctgccttagcctcctcaagtgctgggattacaggcgtgagccaccgcaccaggccctgttttaaaaaaatttcttttcttcttttttttttttgagatggagtctcactctgttgcccaggctggtgtgcagtggcacaatctcagctcactgcaacctccacctcccgggttcaagtgattctcctgtctcagcctcccaagtagctgggactacaggtgcgcgccaccacacccagctattattttgtatttttagtagagacggggtttcagtatgttggccagactgctcttgaactcctgacctcaggcgatccacctgcctcggcctcccaaagtgctgggattacaggtgtgagccactgcacccggcctccaccttccaaattctattcacaaaggcacttctgactttattccttgcctcagcacagaaacagtccacccctttcctctcagtcccacagagtcctctgcacaaagacagtccaccccttcccactcagcccgcagcacgctgggtccctgggtacatccttagcctgcctcctccatcatctcctgcccacgccctcaaaccttgtactcaaaggcagctaggcaaaggtacagcaaatccaacagacgtcccagctgggggagtgtcaggtcagtggcccagcgctgcaggagcgccggctcggtgtttttcagcacccacagcacacacgccagcaaggtccggcttgactcagcagagagggcacagcctgcgcgagaagcctggggccagagaggaatcaaagtcaatttccattttctccatgtgagatgaatcctggccaatctgtatcttgatacatgacttctctcattcaaagtggatgatgtctatggggacaagcctccctactcaccgttggtggcccctgggagatgctggcccgggagccaggggctagggggccaccagcaatggccatggccacagaggggttgatggtacccgcaatgtccccttcgccttctgtgtctgagtcaagcattgaggccagtcttgaccgctgacctgggccctctggcagggaaagacagagggaaagaaagataaacccttggtaagtgctgtccctgtctcaaatttcagaagtcttccctcatggccaggcacagtggctcacgcctgtaataccagcactttgggaggcagaggcgggtggatcacctgaggtcaggagttcgagaccagcctggccaacgtggcaaaatcccatctctactaaaattacaaaaaattagctgggtgtggtggcgggcgcctgtaatcccagctactcgggaggctgtggcacgagaatctcttgaacctgggaggtggaggttacagtgagccgagatcgcgccactgcactccagcctgggcaacagagcgacactctgtctcaaaaaaaaaaaaaaaaagaagtcttccctcacaacagtccccaagagtgggtttctggttgtctgctcctggaattcacttattttacttattttatttattattgttttttgagacggagtcttgctctgttgccccggctggagtacagtggcctgatctcagctcactgcaacctccgccccccaggttcaagcaattctcctgcctcagcttccggagtagctgtgattacaggcacccgccaccacacccggctaatttttgtatttttagtagagacggggtttcaccatgttggccaggctagtctcaaactcctgaccttgtgatctgcccgtctcagccttccaaagtgctgggactataggcatgagccatggcgcctggcctattttatttttttttggatacagtcttgctttgtcacataagctggagtacagtggcgccatcttggcccactgcgacctctgcctcccgggttcaagcaattctcgtgcctcagcctcccgagtagctggtattacaggtgcgcgccaccgtgcatggctaatttttgtatttttagtagagatggggttttaccacattggccagactggtttcaaactcctgacctcgaatgatctgcccgcctcggcctcccaaagtattaggattacaggcgtgagccactgcacttggccaattttattttatttttttcagacaggatctcactctgtcacccaggctggagtgcagtggcacaatcttggcttactgcagcctcaacctcctgaactcaagtgatcctcccacctcagcctcctgagtagttggaactgcaggtgcgtgctgccacgcccagctaatttttgtagtttttgcagagacgtggtctcactaggttgtctaggctggtcctcaactcctggactcaagtgatccgcccaccttggactcccaaagtgctgggattacaggtatgagccactgcacctggccttgatgttattactatagcatcaatcagcacttatatggtatctcctatgtgccagatgctgttctaaggactttaaaaatattcactctttcaaatcataggagctcaagaaaaaaaaaaaatcacttttttttttttttttttttttgaggcggagtctcactctgttgcccaggctggagtgcagtagaatgatcctggctcaccacaacctccgcctcccaggttctagtgattctcctgcctcagcctcccaagtagctgggactgcaggtgcgtgccaccatgcctggctaatttttgtatttttagtagagatggggtttcactatgttggccaggctggtcttgaactcctgacctcatgatctgcccgcctcggcctcccaaagtgctgagattacaggcatgagccactgcgcccggtttttttttttttttttttttttttttgagatggagtcttgctctgttgcctaggctggagtgcagtgacgcgatctcggctcactgcaacctctgcctcccgggttcaagtgattctcctgcctcagcatcctaagtagctgggattacaggcatgcagcatcatgcctgcctaatttttttttttgtatttttagtagagactgggtttcaccatgttggtcaggctggtctcaaactcctgaccttgtgatccgcccacctcagcctcccaaagtgctgggactacaggcatgagccactgcacccggcttaaaaaaatcactgttaatcggctgggcgtggtggctcacgcctgtaatcccagcactttgtgatgtcgaggcgggaggatcacaaggtcaggagatcgagaccatcctggttaatacagtgaaacctgtctctcctaaaaatacaaaaaaaactagtcaggcgtggtgacgggcgcctgtagtcccagctactcgggaggctgaagcaggagaatggtgtcaacccaggaggcagagcttgcagtgagccgagatagcgccactgcactccagcctgggcaagagcgagactctgtctcaaaaaaaaaaaaaaaatttactcttaatcatcaaaacaaccatatggagataagtactttcattagtcccactttatggacgaagaaattgaggtacagtgaggttaagttacttgcccagggtcacatagcaggtaaatggaagagctacaatttttttgttttgttttttgttttttttttgagacagagttttgctcttgttgcccaggctggagtgcaatggcacaatctcggctcactgcgacctccatctcccaggttcaagcgatactcctgcctcagcctcccaagtagcttggattaccggtgcccaccaccacgtcgagctaatgtttgtatttttgggacagacagggttttaccatgttgtccaggctggtctcgatctcctgacctcaggtgatccacctgcctcggcctcccaaagtgctgggattacaggtatgaaccacatgtgcccagcccaaaagctacaattttatcctcaacagtctggttcccaagtctatgctcttaaaaaggtaacccccattctctcccctaaaaagtctcaacagagggaggagttgtcaacaaatatatagcagatcttgccctagagtctcctgaaacaaaaggtagactgagtgtaaataaagctctagcccagtccagcctagctcaattcctgattggactgaggtgatcagcctgttatcctatctgcctaagagagggaaaggacacttctcactgggcaaagatgacattgcttcatccctatggttcttttttatacaatgtccagaatataataaaaaactacaaggcaagggatgaggcaggaaaatgtggtggataagagagaaaaagagacaacagaagcagacacatggatgatcaaatctggaagtcagcaaacagaaacttttaaagttagaagaaaagatgagcaaaaatgagacaaaagatggagaatttcaacagggaattgggatctacaaaaaaatcacatggatattttacactggaaaaaaatatataatatctgaattttttttttttttttttttgagacggagtctcgctctgtcgcccaggctggagtgcagtggtgcgatctcagctcactgcaagctccgcctcccgtgttcatgccattctcctgcctcagcctcccgagtagctgggactacaggcacccaccaccatgcccagctaattttttgtatttttagtagagacggggtttcaccatgttagccaggatggtctcgatctcctgacctcgtgatctgcctgcctcagcctcctgcagtgctgggattacaggcatgagccactgcgcccggcctaatatctgaaattaagaactcaacggatggggtcaacaggacactgggcacaacagaagacataagtggtgaactcatagacaagtgaacaaaaaacttcccagttggattacagagaggaaagaatggaaaaaacagaacaggacataacagatgtgatcaaaaggcctaatatatgtgtaattggagtcccaggagtgaagagtgaaaatgaggcagaaaaaaattcaagtgagaatggctaagaatttccccaaactgatgaaaggcatccacccacaaatcccaattttgtacttccaaccactgttataccacccccctcaacaatgcctataaatgtttgttgaaaatgagtgaatgaatgtactccaatcattttctcacttggatgttccctactttttgctcttcttagaaaataataaatggtacaataatatctcccatctattgtaggctgacaatatctcagtactacagccccccacattttcacataaccttatgaagtagttggtgttgttactgtctccattacaggggagaaacctgaggctcagagatgttatgacttaagtagtctgtcctagcactttaacctgctctgctaatcctaatgtctatactcataccagtgactgtgttctcccacctttactatcctgtgccttctgtgaccaagtccctggatcatgtgaccccatcttcccctggcccactgaccagcaaagtcatgcagccgtggcaaggtatcccgtgcaatcgatagcagtggcaggtacagctcggccacacgagccttcacagtggcctcggcgtagcgggggtcagtgtcatggccacatagcaggctgtgcacagcactgatggccttcttgtgcaacaggaatgccctatggggtaatgaggtgctcaggacagggtggacatggctcctggactgtcccacctgtcctggggctagacaggagctctgctcacccttcagcctcaggttcgagggccagtgccagctccgtcagcaggagcccagctaggaagtgctgctgccggaatggtccactcagttcgaacatgctggtcaccttggggtccggggcttggctggagaaggtggagctctgcagagtgggggaaaaatgggggatgccagcggtcaagggtcagaggtggcaggtcaccattaaagccatcttggaggtgacagaaatcatggtgccaatagccacagatgaaagactgatgttaagtcatctggaggtgacagtgggcatgggtttcaaggccagaagtgaggggctgacgttaacccatctgtgatgtaacagggcacggagtcaaaagtcagaggactgagaaatagcagatggaacactgggctgggagttaggatttaggggagagaaatcagaggttagtccttctgggaaattgctgagaatggcaagagaggtgaagggtcagaagtcaaaagtcaaacataagggattagttcacctaggcagtggtccaccgtgaaagggacagagatgagggaaccataggagatggactgaaggtgagaggttgtaggtcaaagagaggaggcagaagtgaaggcagcccacctgggaggtggtggaggacacagagggggagggcgaggctggaggtgacagggggcagcaggggaggttgagggtcacgtagtgctcgtggctgcacaggatgcgggtgaattccatgcgcagggtcagcagggctgctggattaggggacgactggagccgcgtggccacctgcaggagaggggtggccatcagtgatgtcaacattgctccgccttccatccatgccatgcccaccctgcccacgcccactcctacctgcttgtagtgggcccggaccaggctgaagacaaagccccggtccaccagggacagaaggtcactgaggaagaaagccaggctggcgttgaggtgctcggccagctccacatcctggggacacaggtgcctgtcaacccacacacccaaacctcagccccgacaggggcttggctctcaccaagatcatctgccacccctaggagctgtatcactgccccaaagcctttgtctgtgggctgtggtgactctgggacttcctggttgtcctcctcaggctgccttcccctcccatgctccttaagacaccaaggcagatatgggctaactccctgcaagatcctctcgctctctctgtccagagttcagagctggggagagactatatttcccagcctcccttccagttgaaccacatgaccaattctggccaatgggatttgaggggaaagtgaggtggccacttatatggcagaagcaggtgggtgccggggaactgccagggccaggcccacacagtgatgcctctacaacctacttaatactcagaaataagctatggttatttaaatcacttgtgactgtgttgaagcgaattagcctctgccctaactgatcgactcttaccatcatttatttttattttaattttaattaattaatttattttttgagatggagtcttgctctgtcactaaggctggagtacagtggcacaatctcggctcactgcaacttctgtctcccaggttcaagcgattcttctgcctcagcttccccagtagcttggattacagacacccaccaccacgcctagctaatttttttatttttagtagagatggggttttgccatattggtcaggctggtctcgaactcctgacctcaggtgatctgcttcccttggcttcccaaagtgctgggattacaggcgtgagataccgcacccggcctctcagcaccatttaatgtgagctttactgagcatctactctgtgccaatccctgtgaatgaggcagatgccatccctgctgcgggtccaactcaatccagtgtgtgtgtgtggggcgggggcagggagacacaaaataaacaagaatttcagatagttctatgtgcttcaaagacaatattaaattggtgcaaaagtaattgcagttttgcaattactttcaatggcaaaaactgtaattacttttctttctttctttctttctttcttttttttttttttgagacggagtcttgctctgtcgcccaggctatagtgcaatggcgcgatctcggctcactgcaacctctgcctcctgggttcaagcgattctcctgcctcagccttctgagtagctgggattacaggtgcgcaccaccacacctggctaacttctgtgtttttagtagagacagggtttcaccatgttggtaaggctggtctcaaactcctgacctcaggtgatccgccctcctcggcctcctaaagtgttgggattacaggcgtgagccaccatgcccagcctataattacttgtcaccaaccttaacagacgggggtgacattttcagagatactgaaggataccaaagagccatggggagaatggcatcctgggttaagggaacagtcagtgcaaaggccctgaggcaggatgtgcctagcaagtccggggaacagtgaggtggctgatgtggccctgaggcccagctggtattcgttctgccctcatactctcttgagccactctgaggcctcacaagttagcctcagtggccctcaaatccctgcaacccggccaggcatggtggctcctgcctgtaatcctagcactttaggaggctgaggtgggtggatcacagggtcaggagtttgagatcagcctggccaatatggtgaaaccccatctctactaaaaatacaaaaaattagccaggggtggtggtgggcgcctatagtcccagctacttgggaggctgagccaggagaatcgcttgaacccaggaggaggaggttgcagtgagctgagattgcgccactgcactcccgcctgggcgacagaatgagactccgtctcaaaaaaaaaaaaaaattagccgggcatggtggcgcacccctgtagtcccagctactcaggaggctgaggcaggagaattgcttgaacctgggaggcggaggttgcggtgagccgagatcgtgccattgcactccagcctcggggacagagcaagactccatctcaaaaaaaaaagtggattatcacaggcattgttcttctctggatctctttcttggggtagtttcctcaccatctggatcagcccctgggaatgtcagtctttgggaaggctccagtgagacaaggccagaacctttgagaccagcttggaggtcacatgtgattgtgtaagggttggcctgggccagaacgccatttcaaaaatctggaaagttcccagcaaatccagaggtcccatttctccttagacaccaggccatctcctggcatgggaacataggaagaccccatctctacacacacacacacacacaaaaataggtgggtatggtagcacgcacctgtagccccagctactctggaggctgaggtgggaggattgctttagcccaggagtttgaggctacagtgagccatgatcacaccaccacactctagtctggacaacagagcaagaccgtgtctcaaacaaaaacaaataaaaaaacaaaaacaaaaccacacacaaaaaaaccccagtcaatctggccaggcatggttcacgcttgtaatcccggcactttgggaagccaaagtgggagaagcccttgagctcaggagttggagaccagtctgggcaacatagtgagaccctgactctactaaaaaaaaaaaaaaaaaaaaaaaaaattgccaagtatgttggcttgtgcctctggtcacagctacttgggaggctgaggagagaggatcccttgagcccaggaggtcaaggctgccgtgaactatgatcgcaccactgcgctccagcctgggcaacacagcaagaccctatctccaaacaaaaacaaaaacagccaatctggacatagctgagccacattcctgcagggtttctgttggctggattgagtgatggtcacccctgttaggtgggacatctgccctctgctccaccataagccccactttcccagctgaaactggtattgacagtgaggggtctggagctggtggctcagattcaaaagcctcattctgccccttctcagtcgtgtggtacaaggttaagctaccactcattcgatgcctcagtttccccatcagtaaaatggagataacaataatactaacttcatgggttgttgtgagaatttaatgatacgatccaaggccgggcgcggtggctcacgcctgtaatcccagcactttgggagggcaaggcgggcagatcacctgaggttaggagttccagaccagccaggccaacatggagaaacactgtctctactgaaaatacaaaattagctgggcgtggtagtgcatgcctgtaatcccagctacttgggaggctgaggcaggagaatcgcttgaacctgggaggcggaggttgtggtgagccaagattgcgccatcgcactccagcctggacaacaagagtgaaactctgtctcagaaaaaaaacaacaacaaaaaaatgatacgatccacataaaatgcttagatatacagtaagtgctcaataaatgctccatattattactattatgattagtattgcctgcctagcccctgagggcattggaattggtaatccagggcctgaacaagtccactgtcagggtctcagaacatcaacatccatttattgagcacttgctgtatactctgactgtgctaagggttaatggatctgccttgtcacttccccgctcccaccaaccctcatttccttcctcattcactacaatctagccatccttactgctctactgttagcccaagcatggtcttgcctcagggcctttgcacctgctattccccctgcctggaatgctctttccccagacattgcatggaatgatcccttactttcttcaagtctccccttaaaagctacacaagggtaaggatttgggtctgttttgtttattgttatattgctacacccagcacagggctgtgcacgttacaggcacttaagaaacagacaatgaatgaacggatccacccagcaaagtggattcctggtcttacggccaggagacactgggcaggattggcgcccccacctggctggctctatgtcctccctcaggtttcttcccacattgagaccctgcatctctcaccttgtggacacgggtgatgacctccaggcccacagagcccaccaaggcagtgatgtcgtccaggaagcgtccggggaagcgcagcttgcggggtgtgtctagtcgctggccaagcagcaggtgcagcgccatactcttcacctgggggtggggtgagagggctgtgggtgggatttgaagggctgtgggtaggacttgaagggctgtgggtggggcttgaagggctgtgggtggggcttgaaggactgtgggtggggcttgaagggctgtgggtggaggaggcttgacaggaggggcggggctttattagcaatggaggtgggctgaaggtaggtttgagccctgtagctgcaggtagaagctggggcctgagggatgtgggtggggcttgtgacctatggatggggcttaagaaagccgtgggcagatcctgtgagcatcccaggcaaagtgtagagagtgggaaggctgagaggatgtgggaggggcttatgcgggtctccccagggcaagtcagaggtgggacaaagggtggggcttgaggcactggatttgaagggagctttattggaggcccagaggggatgcagccagcaggccctgggaaggaggcttcaaataacctattgaagagttttagggatgtgtcttaccttgatcagaaagctttccctctttttttttttttttttttgagatggagtcttgccgtcacccaggctggtgtgcagtggcataatcttgactcactgcaacctctgcctactgggttcaagcgattctcctgcctcagtctcccatgtagctgagattacaggcacgcactactacgcccggctaacttttgtatttttagtagagatggggtttcaccatgttggccaggctggtctcaaactcctgacctcaagtgatccacccgcctcggcctcccaaagtgctgggattacaggcgtgagccactgtgcctgaccacagctttctctctctatccaggaatatctcctgcaggatgcaggtctcctgtctaggtgagggtctcttaatggtttctctccttaaagagtctcatggggaagggtggctctctctaaaggtggtttcaggtacagtctctccagggagacaccaccttaagtgcctctcacctccctaggttgtgggggggggtctcttggggccatttctcaaatatctcaggtgcaatttcagggggcttctctctttttttttttttttttgagacagagtctcgctctgtcgcccaggctggagtgcagtggcacgatctcggctcactgcaagctcctcctcctgggtgcacgccattcttctgcctcagcctcccgagtatctgggactacaggcgcctgccaccactcctggctaatttttttttgtatttttagtagagacggggtttcaccgtgttagccaggatggtctcgatctcctgacctcgtgatccgcccgcctcggcctcccaaagtgttgggattacaggtgtgagccactatgcctggccagggggcttctctctttaaaaaaggaaggggctccactgggggtctcttgccaccaggcagggaggagggggtctcaccatgagctggaagaagaaccaggcgtgctggaggatggcctcgcgtacggcactgctgctgaccacccactgcagagccagctcctcgtgaagcagctggggacagaggcaggggtcacagagtgcgaggtgccaccccttcccgtaccccctctggagacatgccaggggaagatgcagctggagggctcggggttagtgcagcaggagccaggcaggaggagggggacaagaggagtggaagtgccctttccctgggctcgccagacccccctggactctggatgggggaggagcactggacccctttgctggggaccaggacaaaaatagcgtcatccgcacctccccccactaccttctgcacagtgggtctcagctgggtggctggtggggccgaggaggaaccctcgaggtaggaggaggctcggctagagttgcagtcgatggcctatgatgggatgtgatggcgaggagaaggttagtgtggatgaggtgaaggggtatgtggttggaggaaagacgtgttcacacagacagggatggggaaaagaggtaggttagtgtgaatatagagagagaaatgcttccacatggatggaccagggccatggatgccaatggggacaggcaagaaagagagatgggccggcgtgggttgggaggggaggctggttggaatggccagggtgctgtgggagtagacggggcagtggaggcagggacaaataaaagagtcgctggagagagctgggtgagtcaagatcaaggtgtgtgggtatgggagaagaacgtgaggctgggcggggtggctcaatacctgttatcccagcactttgggaggctggggcaggaagactgctcaaacccaggagtttaagatcagcctgggcaacatagtcagacattgactctactaagacaaaaacaaacaaacaaacaaaaatatatatatatggctgggcctggtggcgtgtgcctgtagtcccagctgctcaggaggccaaagcaggaggattgcttgaccctgggacttggaggttgcggtgagctgtgatggtaccactgcactctagcttgggtgacagagcaagactccatctcaaaaaaaaaaaaaaaaaaaaaaggaggatgctgtaatcctagcactttgggaggccgaggcaggtagatcacgaggtcaggagatcgagaccatcctagtcaacatggtgaatggtgaaaccccgtctctactaaaaatacaaaaattagctgggcgtggtggcaggcacctgtaattccagctacttgggaggctgaggcaggagaatcgcttgaacctgggaggcagagcctgcagtgagccgagattgcaccattgcactccagcctgagtgataagagcgagactccgtctcaaaaaaaaaagaacgtgatggaggaggtgagaataacaatgaaaacacagtacgccagtgaccagtgacagcagtgcaaccacaacaggcaggaggagtgtggatggagtgggaccgagaacacacgaaggctgggaatgggtacatggtgtgtggggtgaaggcagaggagatgaaatcagtgtagacagcaagaatgtgtgtggccagagaaggtgagggtgagtgtagacgaggtgtagagtgtgaccgagtcagtgagtctagaggacagagaggaggatgcagaggtggaggagggtgagtgtggacagaggaggttaaacacaagatggggaaggaggagaaagacaaggcaggaagataaggacagaggaggtgagatgttggtgaggtgccaggaatagcagagagagcccaaggttccaggcctggccctgcccaagcctggcttgggcctcagtatccccatctgtgaaatgggtataggcagaggagttcaagctccactctcgcttcctccttcgctggttagggggtgaggctgctcgcaggaacaggaggtctgatgacagagacgacccaaccctgggacctactctgacacttgagggctctctagctaccccagtcccagccataccctggcaactcactgtgcaccgtgagggccttccattgaaaaggcccagcctcagtgtcacccagatttccagattcccagcaatccaaggaaatgactgcccaaaggccccccctgcttgttctgctaggagtcccctgggcctgtcatagggtacaggttaccttggtgatgggcacagagctggaataggccctagggccaagtgtgtaaggaagcaagccctgtggcctcctctctgtgcgtacagtcctctgaccttggtcccaatatttgtacatgcctttccctcttcctgaacacccacacccacccacccttccctagctgactctatcttacccttcgggtcccagcaaaagatgtcactcccctggagaagcccccaagaccacccagagggaagctggtattcggttgctacttgcttcctttccacgctgtgtgatcatatacttatgcatttgtttgatccgtgtctatttccccaactagctggaagctcagggtcaaggccagaccaagaatctatcatcccaacaaaatcccactgcagtgccctcagccctaactcaagcacaggctcaggactgctgggggagcactatattttgagtccaaactgcatccgaaaatttggagtgttatctccattttacaaatgaagaaactgaggctcaggaagatgcatccaattgctcagagcatggggtgagctcatagcagagctaggacttgaacccaggtctgtttggaggcaaagcgtccccctacaccaggtacctggaaagaggcagggtaaggggagctctttgtctaaaatgggataggggagccgagaggttccattccagccctttgagagtcccatcatcaggggtggattaaagggaggtgaacaggccatgcagggcagtgaggttatgggtgactggatttgcacttcgtttgcatgcgatttgcatattacccctgtgccttctgtctccatctgagactgtggcctatgtggcagcaaaaagccagttaggatgacccagtgatacctaaacacagacttcacagccccaaacaaaggcaggagaggggtctgccacctccttcaggcagcccccctaggttagtcagatgcagccaggaaggtgggaggagctcatgctgaggtggtgtcacatgagtgcagggacaggtaggaagggcacctgtctggggtcggccccacaataagggggcgcccgccgcagcacagccttactgcctcctggagcataagcggaattcacccaggagtgtgagcgatcgatgccctggagatacacggagaagtggtagcatccccagtggagggcagggaaagcagcatgaaataccaagcgtggacatggttctggaccatacatgtgcccacatgtgcacctacacacaatcctgaaaaatgtgcacgtgtatataggtccattgggtgcatgcctttacataacttgtgtatgtgggtccacaggtgcatgcatacacacccctgtaagtctgtgcatggggtgcatgtgtatacacacccgtacacatatatgcatcaggtgaatgtgtatacagacccaggtacatacaggcacaggatgactgtgtatatgcacctgtgtaagtatatgcatggggtgaatgtgtatacgcacccgtgtctgtatatgcatggggtgaatatgtatacacacttgtgtccacacatgcatggggtgaacacgtatacgtgcccatgtacatatatgcatagggtgaatgtgcctatgtacctgtgtaggtatatgcatgtgggggtgaatgtgtatatgcacccatgtacatatatgcatggggtgaatgtgtatatgcacctgtgtatgtatatgcatggggggtgaatgtgtatatgcacctgtgtaggtatatgcatgaggtgaatgtgtatatgcacctgctacactaggtacatattgctctttgttcagccacgccaagctccgccacccatcctcgggtcagtcacggagtagagctcaacacaaagtctgatccataccccacaacctgtgacagcccagcccaactctgctgcccagagtgacgccttcattcacgttgtcgtctctgttgtttcccatgcttcatcaacagattcttcgcccacacacgtggcaaccacaaccactgaggctggagattccagggcccccgttgccctaccttgctggccaggatgcgggaaacctcgtcatccacagagccaggggccacggcgaggtcagggttgctgctgctgatgctcttggaacgcgccaggtagaggcttgcggggcgaccagagccacgggccagtgtggcagcctgcactgtcactggaggggcccctgaggatggagtgaatagggtcaaccacccacccacctgatgtgatgcctcccagtcccttcctactcagctaatctctgcaaaatcactttccttctctgagcctctaagttcctcatctataaaataggcataatggctgccgcctcacagagattgggggggcactgaaaaactgagaataggccaggtacagtggctcatgcctataatcccagcactttgggagggcgagccaggaggatcacttgagcccaagagttcaagcccagcccagccaacatagcgagactctgtccctacaaaaaaattaatgaaaaaattagccgggcatggcagtgcgcgcctgtggttccagttacctggggaggctgaggcaacaggattacttgagcccaggagtttaaggcagcagtgagttatgatcgtgacactgcactctagcctggccgacagaataagatcctgacttttttttttttttcttagagagtttcactcttgttgcccaagctggagtgcaatggcacgatctcagctcactgcaacctctgcctcccgggtttaagcaattctcttgcctcagcctcctgagtagctaggattacaagcacgcaccaccatgctcagctaattttttttttttttaatgagacggagtcttgctctgtcgccaggctggagtccagtggggagatcttggctcactgcaacctccatctcctgggtttgtgtgattctcttgcctcagcctcccaagtagctgggactacaggcgtgagccaccatgcccagctaatttttgcatttttagtagaaacggggtttcaccatgttggccaggatggtctcgatctgttgaccttgtcatctgcctgactcagcctcccaaagtgctgggattacaggcgtgagccactgtgcctggcgtattttattttttgagacaggctggtctcaaactcctgatctcaggtgatccacttgcctcagcctcccaaagttctgggattacagccgtgagccaccatgcctggctgaccctgactcttaaaaaaaagaaaaaaaaaaagaagaaaaaagaaaaaaaccctgagaataatgcctgacacatagggattggtgtttatttggcaaattaaaaaaaaaaaaaaatccaactctattgagggttcactatgtgctaaccattttgtgtggattactatgtcacttactattaccagtgcccccatgaggtgggtactattattatccctgttttacaaaaggaaaaacaggctcagagaagtgacgtcacttgcccaaggtcacagagactgtaggtggcagggccaggattcacatctaggcagctcagcttcagtctccgctccaagctactgaagaggcttgctgactatctgaatcgttttccagccaagcacacagaagccacaccccagggatggggcaaaagtgggcaaaacattatctctcttgcaagttgctcaaaccagccaaggcctgtgaggcctcagggcctttgcacatgctattctcactacctggatgctcttctcccagatctttctttcttatttttttttttttgaaacagggtcttgctctgttgcccagactggagtgcagtggcgtgatctcagctcactgcaatctccatttcccgggttcaagtgattcttctgcctcagcctcctgagtagctggggctacaggcgtgcgccaccacacctggctaatttttgtttttgtttttgttttttgagatggagtttcactctgtcacccaggctggagtgcggtggcatgaccttggctcactgcaacctctgcctcctgggttcaaatgattcagcctccctagtagctgggattacaggcacctaccaccatgcctggctaatttttgtatttttagtagagacggggtttcaccatgttggccaggctggtcttgaactcctgaccccctcaagtgatccccctgccttggcctcctaaagtgctgggattataggcattagccaccatgcctggccccagctaatttttgtatttttagtagagacagggtttcatcatgttggccaagttgatctcgaactcctgacctcaaatgatccatccagctcggcctcccaaagtcctgggattacaggcgtgagccaccgcacccagcctcttctcccagatatttctcgtctcacagggatttctacaaactcaccatccgggaggctgggctcagtgccaggaaggcgaaaggcgtagtggacgtaggcagccagctgtgggcagtgaccgcgggcatcctgggctgcctccaggctccggtgaacaaggctgactacatgggccattgcttcaaaggctccacggcccaggttcactgcagggcagagcagaggtcaagttccagggcccaaggcctctcacctccccgcccactttccaaatataaagacatcaggatttgagggatcatgtgctcattaaggggtcacaaatttttttttttttttttttttgagatggagtcttgctctgttgcccgggctggagtccagtggcatgatctcggctcactgtcacctccgcctcccaggttcaagcaattctcctgcctcagcctcccgagtagctgggattacaggcatgcgccaccacgcccagctaattttgtatttttagtagagaaggggtttctccatgttggtcaggctggtctcaaactctcgacctcaggtgatctgcccgcctcggcctcccaaagtgctgggatgacaggcgtgaaccgctgcacccgggccaaagggtcacagaagaccttctctgggtgcaggggactggaggtcatttttcagatgagaaaaatggccagagaggtaaatgggcttatagaagatccctcaggacctcaggactgagaagccatgtggatggggaaactgaggtctgaggccacattcgcttaccaatctggccactgatgatcgggggcctgatgaccagacgcacgagcttgtccagcacgtggtgggagaaggccacaaggggttcggggctggccaggcgcagtgctgcaagactggcccgcagctcctgctccacgttgccctcgctcagcacagtgtccttgagccggaatgggaaggctccctcctccaggacgtgcaccagggtgaagaatttgtccaggtaggggtcctgggtagggatgtggagtgagcagggtggggcctcagggaatgaagaccacccctgcctgaatcagcagcttcccttaaagctgggtccagctgaccaaagtcacgtccaaggcctgaggccagacctccccggccatcggcaactgttactcaatcgtagggcaggcaagaggggagcagggcgggactcttggttcccggcccaccccgtacctgggggtgcacagaggacacggctgtgagctccacactgaacacgcccttgtgaccgtccacccagcgcatgcccggaagcgccacctgtgggagggaggcaccaggtgggcactggtcagccctccctgactgatcaggtcacccagcggccccagccattgcgacactgcagcgtgagtgtagcccggtctgggggtgcagccaagcaccctgcccccagccctggtcccagtagactgagagggtccactgggcaggctggaaatccacatgccaagacgggggcagagaatggagacacagggtgaatgaatattcattgagtaggtcaggaaacaggataggaggatttgaggcctagggtcattaacaatggtgcattcatggggaatgataaggtactacgagggcaggggacagtgatcaggaaggcagtcagggtggctaaagtgggaatggagcagagaggcaatgggaatctttggggaggacatgtaggacacagagaggcattaataggggaataatgagctacacgggggccctggaggcaccagtagaggataacaagcctcccaggattgacaggaaggaaggcaggtgactcgggagtgcttctggggacagtgcattggcaggcaggagctccagggcacatacatcgggtgtgagcacggaatagctgggcggcggctggtccacagacactgggagacagaaggggccggtcctcaggcgcccgtgctgcagcagtgggatccactggggagaggctggaggtcaggtctgcggccaggttgggggacgaggagggctcagggggagggagggaggggacggctcacagtaaagcccacgggtgtctccagggcagtgcccggccggggctggcagctgacatggtagaaggtgaacagcaggtgatggttctctgtcacgcaggctggaagatgcagcttgaactcctcgtagaactcgggggacctggcagaatcgggctgggggatctgctgggggctggggtccccactgtctgccccatcacctctgccatgccacgcccttattgctgctaggccccactgtctctgctgtctgcctcagcttccctcattagcactctgggagcctctacctctcttcttcctgtcccccatcttcccatcgatgctgccttatgtgtatatataagggacatcctcctacccccatgagtgcccccaagttcctcacgtgtccccctacatacttgttatggtagaccaccggtgtgaaggcctcgcgggtaaattcactgcagctggacttgccaaagatgacctgggagagtggattcatgagggacccatgggggatgccctaccccccttccctggggcacagccactgaccggcagagcctggctggggtcctcgcctgtcatgtactgcactcgcacagcaaggttgcgcacggagccctggcggctgctgaagttgaggctgtgcgggtacacgtacagcaggttcctgtggggggcaggatgggggtgtcagagggacaggggccctgaaggtgcacatacaaggctggggtgatgggacaaggctggctgggagcacagacagtccaggaagagtaggtcatgaggctggggcattgagggcccggtgagaggtaatacaggtatcagtcaggagataggacagagggcagagggtgggggacaagcgagcaccctaaaaacacagattgggaacagtgtggtagagggtgggaatacagaaggacattggaggcactcatggggcacagtgacacacagaaggcagagaatagcgaggcactcagggccagagttccaaggtacctcaggtggccagtggtcaagcctaagccccacccaagggcctgactgcccttcccccaggaggtcactagagttatgtggcctgtttctcaggtggggaaactgaggccagagtccgagtcctgcctccttcccccaggggcaactctgtgcaagccttgacccctctctgggcctcagtttccctatgtgtataatgggcacttcaggccttccagctgagcctttgtaatgatactgatgatgataaataacaacaatgacaataattgcaccaaacactattactacaacaatgaaataatcgcgcctactgtgtgccaggctctgttctaagcactcaacatgaaataactcatttacttctcacaagtagctcatgaggcaggactaacatcaccgccattttacaagcagggaaactgaggtacttgcacaatcacccacggagtaaaatggcagtcagtggtgatctgggcatatgcaggtcttggagatcaggctgtgtgaccttgggagagtctctgccacctgcacctgcccccttggatactaaccaggccaataaaagcccccacgtggcaagtatgtgggaggggaacaagagcagatattgtaatggcaggtcaaacagctcagggcaaaccatcaatgcttataaaatctttactgttattaccatcatcattgcgatgcctattcatagatggagaaacaggctcagcatggtgagtctcaggaactcccagcagggtctggggcccgtcctctcccaatgccccccacccacacctggccctgagccccaggaagcgtgatcccggcgtggcctagccggacattcgcctgatgcaactatcgcaccactgccaggcccttgtgcaatgcggggcaccaggtcggccagttaacgattgactggggatcagtgggggtatgaggcataaaaggcttcagtgacagtgctgtggctataccttagaccctcagtcatgccagtgcctgctctgtgcctgctctgggccctggcaatggtgacccggcctgcctcagcggcccccatgggcggcccagaactggcacagcatgaggagctgaccctgctcttccatgggaccctgcagctgggccaggccctcaacggtgtgtacaggaccacggagggacggctgacaaaggccaggaacagcctgggtctctatggccgcacaatagaactcctggggcaggaggtcagccggggccgggatgcagcccaggaacttcgggcaagcctgttggagactcaggtgggcaccgtagctgcgacactgtggggtggccaggagtccaaagaggagttcgtgtctagggtaaccaaccatcctggtttgcccaggactgaagggattcctgggatacaagattttcagcgataaactcaggcaagtccttaggtacacaaagatgagttggacatcctactagtgacccactgtttattaagcagatggaggaggatattctgcagctgcaggcagaggccacagctgaggtgctgggggaggtggcccaggcacagaaggtgctacgggacagcgtgcagcggctagaagtccagctgaggagcgcctggctgggccctgcctaccgagaatttgaggtcttaaaggtaaggagctcccccaaccctagtgggctgagaccctgatttccggccagaactcgcttctgcaccttgagtcccaaagacctcccagatcagcctcccagctctgtggcctctaccctgcatgtccccagacaaaactcaagtccttttgtgtgcctcagtttcccttttgtgtgcctcagttgcaaataagggcaacacctgatatctcacagtagggccaggtactcaatgcaggtaaaatattcagcatggggcgggcacacagttggtgctcaataaattctttttttttttttttttgagacagagtctcactgttgcccaggctggagtgcagtggtgtgatcttggctcactgcaacctccacctcctaggttcaagtgattctcctgcctcagcctcctgagtagctggaattacaggtgcaccagctaatttttgtattttttagtagagatgggatttcaccatgttggccaggctggtctcgaactcctgacctcaagggatctgcctgcctcggtttcccaaagtgctgggattacaggtgtgagccactacacctggccaataaattcttactactagagaaactggtaacattttgtgagcacccagtaagtacccagcactgttctatgccctttaataatccatatgatggccgggcatggtggctcatgcctgtaatcccagcactttgggtagctaaggtgggtggaacacttaaggtcaggagttcgagaccaccctggccaacatggtgaaaccccgtctctactaaaaatacaaaaaattagctgggcgtggtggcacatgcctgtagtcccagctactcaggaggcttaggtaggagaatcgcttgaacctgggaggtggaggttgcagtgagctgagatcgtgtcattgcactcagcctgggtgacagagagagactcaaaaaaaaaaaaaaatccataggatgttcatcacctccccatgaagtgagtcctattttatccccattttacagatggggaaactgaggccaaagagcattgttgacttgctgggtcacacagatacaatgaggggctggggcagagggtcaggggatgggaggtgaggtggctgtcggctgaggtttccattctgacccccacaggctcacgctgacaagcagagccacatcctatgggccctcacaggccacgtgcagcggcagaggcgggagatggtggcacagcagcatcggctgcgacagatccaggagaggtgagcctggcaggggtttggcaggcagggcagttggatggggggcgcacagggcagctggaaaggggccccctcacctgggctgagccacatctccctccccagactccacacagcggcgctcccagcctgaatctgcctggatggaactgaggaccaatcatgctgcaaggaacacttccacgccccgtgaggcccctgtgcagggaggagctgcctgttcactgggatcagccagggcgccgggccccacttctgagcacagagcagagacagacgcaggcggggacaaaggcagaggatgtagccccattggggaggggtggaggaaggacatgtaccctttcatgcctacacacccctcattaaagcagagtcgtggcatctcacccagggtgtctgtgtgtgtccttggcttagggagaccccacccagcatgatgtatgaatacctcccattcaagtgcccagctgggccccagaggccgtacctgtagctggtatggggggcatagacttcgcgggcggggaactccagaatctccttggtgggccggcccctggggtccgggtagggcttgatatgaagcagctcaggggagaggcagaagtggggattttcaggagccggagaaatgtcgatcttgagctgggctgggaagggaagaaccggtttgcacctgcctgggagcctcctggctcagcccaccctttctgggctgtgtagtcagggcagactctcccatgatgttctctggggactgggggctgtgtccctcaggcgccaaggccagaaattgccctcaactctgctgtctgtcaccctaaattttttttcgtttttgtttttcttttttttaagtggagtcactctgttgctcaggctggagtgcagtggggcgatctcggctcactgcaacctctgcctccccagttcaagtgattctcctgcctcagcctcccaggtagctgggattacaggtgtgtgccaccacacctggtgaatttttgtatttttagtagagatggaatttcaccatgttggccaggctggtctcaaactcctgacctcaagtgatctgcccgcctcggcctcccaaagtgctggcattacaggtatgagccatcacacctggcccccaggctggtcttgagctcctgggctcaaacaatcatcctcctgcctcagcctcccaaagtgttggcgttacagacttgagccactgcaccccagccttacccctacatttgatcaactctgcccccaggacccctgcctgccccgctgccattaaccacctattgacgctgtatccatcttatttattctgcttcttgtctatggtccccattagaagctgtagccagcccctgaggtcagggatttgtccatcatggtcatcgttgggtctctgatgcccctggcacagtaggtgctctcagtgtaggtttgttgagtggctgagtgagagtgatacttcttgtgtatggggtgtgccacgcaccagtcacaggacgtagtcgccgcagcagggacgacgggcgcctcatgtcagccaggaacttgaagaggtcctcgtcactgagtcgctcagcctcctacatgggacccactcccgtcagcctgggccagggggctaggggtccccagggctaatgcagccagcggggagtgggagagtccctggccccagggtaggacacctgcttaaagaagtttgtgacagttagcgtggctggacggaagccagagaagctgcaggcgtcgtccccactactcgcccggtcctggggcccccgacggcggcggtctgtccaggctggccggcgctctaggggagggaatgacaatgacaaaagggggaccaagatgaaacagggagactcaggggcggcacagttcggccagcagagggcgcaccccctcgccccgtagccccgccccaggcctgtcagcaccaccctttagccccgccccaagcctgttagccccgcctcctcaccgccctccgagtcagagtcccggtccagctgcccagcgctgctcacgatgttggccaagtgcacggccgtccaggcgaagggcatgcggtagcggcccaggcgggtgcagaactgctcggccgccaggcgcagcttctctagcttctctttgttctgtggggagaccccgtcccctgccagctcagcatcctagccctgctgagtcagggatctgttgcccctagtccagcctccacacgcttaccttggctgtgtccacttctttcaacaccatgtaaggctcacagcactcactgatgtccccttgctgaagcaccttctccaactgcggggcagatgaatgaatccagtgaggcgctgcccgaacgctctgttcccccgtgctggctccccagcctcctggacccctcatgggccctcggacactcctaacatatgaaggcctttgctccaacacctcccatggctcccgctgtccttgggatcaagggttagtgttggcctgcctggtggctactccctcccattcttcagatctacccctaacctccaagcctacctttagctggtgatattttccctaaatttacttatttatttacatttatgtatgtatgtatgtatgtattatatagagacaggggtctcgctatgttgcctaggctggtctcaaactcttgggctcaagtgatgcccctgcctctgcctcccaaagtgctgggataacaggcttgctgtgaatttttttttttagacagagtctccctgttgcccaggctgaagtgcgtgatgggatctcagctcactgcaacctctgcctcctgagtttaagcaattctcctgcctcagcctcctgagtagctgggattacaggcatgacccaccacacctggctttttttttttttttttttttttttttgagatggggtctcgctctgtcacccagacggaagtgcaatggcacaatctcggctcactgcaacctctgcctcccgggttcaagcaattctcctgcctcagcctcccaagtagctgggactacaagcgcctgctactacgtcccgctaatttttgtatttttagtagagacgaggtttcaccattggtcaggctggtctggaactcccaacttcaggtgatctgcctgcctcggcctcccaaagtgctgggattacaggcgtgagccaccgcgcccagccaatttttgtgtttttagtagagaatgggtttcaccatgttggcaaggttggtctcaaactcctgggctaaagcgatcctcccgcctcagcctcccaaagtgctaggattacagttgtgagtcactgtgcctggccttccctacatttttctttgttagtgtaaatagaggccactctgggcatggctctgagccatgaggcctagactccaatcctgaccactcaggggctgtgggaccctgggcagtgggaccctatccactctgtgcctcagtttccccatctggaaaatgggaaccatggcacccctccaccttaggccctgtggtgaggactgaaggagggatccctgtgaagcgtgaccatagcagcacctgcctgtggatactggattcatttcatcattgcaaactaatagaaggttttgagaaaagaaatttgacctccctcccagaaacagaaaatctcaaatgagggtgccaactatgtctttcatctgtccacaaacttcccaacagcatctcacccacctccgaggaccccagcctgtcacatgtgcctagggatggcttttctccccaggctgcccacgtatagttatcagctcaactgtcgcctctccctggaagcccttggtgatttctccccacctgagttggatcaggggcctcctccctgcctgtgtttcccccacaacagccctgattacccttcttggtgatgtatctgtctcattctgtgaaggcagggactaaatcagtgacattcgccattaccacccccttgcccagccccagcaggcaccttgatgaccaggaagatgtcaggtgaggggtaggtcacagagaagatggcagagcgggccagggtggagatggcagggtgggtgccatgagcccgaagcagccccttcatggagtccgagttcaggtcgaagtagaagttctccgagatctggggacaccagaggcagctgggccaccacctctgggaagcccacagccccccaacaaggagaaggaaggggaggaaagagaaaaaagggcctcctaccttctttttctcccgcacatcatacagagccaagatcccaaagatgggctcaatttcaatctcgaacctacaagtaaatgggagggagggggctctccttaacacttcccgctgtccacacaccccactccctcttgaggcccaaggtggggggcatctgactcccactgggccacatggaaccgccacttaagggcttgcagaaaaggtacatctcattttgcaaaaggggaaactgaggcactgaagttttttgttggtttttttttttttgagacagagtctcgctctgttgcccaggctggagtggagtggtgcgatctcggctcactgcaacctctgcctcccgggtttaagcaattctcctgcctcagcctcctgagtagctgggactacaggcacgtgccaccatgcccagctaattttttgtgtttttagtagagacagggtttctatgtatgtatttatttattatatagagacggggtctcgctgtgttgcccaggctggtctcaaactcttgggctcaagtgatgcccccgcctctgcctcccaaagtgctgggataataggcatgagccatcacgtccccggcttgctgtgaattttttattttatttttttagacagagtctcccctgttgcccaggctgaagtgcgtggtgggatttcaccatgttggccaggctggtcccacccgcctcagcctcccaaagtggtgggattacaggcgtgagccaccgcgccccgccgacactgaagtttttttccccctccctacaccctcagtaagtaactcacacagagctcctcctccctgcaaccacggcccttgttccgttggcatgggggcagttttgggctcaacaatccccacatcttgaaattctcaacttccgggtttccccatccctcctttctggggtgtcatctgccgccattgtcactctgcacggagttcccatctcgctcacctgaacggccaccataaaagtccttccctgtcttactccaccttgctggcctccgctcaccacgcacctccaaactgaaacactgagcactccccgttacaccccttccatcctctctattcagccagctcctcttcctcactgggtctccatgtacacgtccccctgcaagggaagctgtcccagatacccgctcgcacccctcaagctgggccaggggactcctccaggactctaggcactttcagcatcgcttatcccggctctgtgtggtcatcgcatggttatgtgtcctgtatacagtagggacttcataaatgttttatttttgtttctttgtttgtttgaggctggagtgcagtggcacaatctcggctcactgaaacctctgccctccgggtcaagagattctcccgcctcagcctcccaagtagtggggattacaggtgcctgccaccacgtctggctaatttttttttttttttttcagtagagatggtgttttgccatgttggccaggctggtctcaaattcctgagctcaggtgatccgcccgccttggcttcccagagtattaggattacaggtgggagccaccgtgcccggccaataagtgtttgttgaatgactggatgagcccacagagccaggtcccaatccttgtgtttagggcaggaggcccacccaggcctcaggccagaatggagcctccctttcctgccccgatccaggcaagaactcggggtggggagcggcagggccaggctcaggtccaagtccacatcctgttcaactctgttcccacgcacttctgctgctccccgggggctggtgtggaggggccctgggcggctgagagccaggcccagggtcactagcacccgccccaaagcctcccggccaaaccctggatcccagcagcagagcaggcaagcgccagactccagccttacaagttgtatggtcttggcgtcatgtcaccactctgtgcctcagtttccccacctgtgcccacttcatgaggttgtggtgaatataagacgggttcatatacatgaaaggctgagaactgatcctggcatacaattggcacttaaggattggagactcgggataatgaaaaaggaagtcttccttcccccataaaagcccatacataggtggccacataggtgacagggccgcacacggtaatggcactactcatgtagtgtgtaccccgccggaacccatgtggttgcttcacgcatctaagaagagagacatgtcagtatactcacttgagcgacagacacttgaccaagatcctttgtccaaagtgctcgcggggtggctctgggcggctacagcgttccacggcttcatcctgccaagagtggggggtgggagctgggcgggaggagctgggacatcctccaggaagggtctggaatgcccagcctcagaccagctctaccccagcctgactaaccgtctttccatccctgcctctgagcctttacacgtgctgttcccctgcctggaatgcccatcttctcccactcctccttgtctcgctaatgtctgctcactgttcatatatacttctactatatagaggtatatagtaggtgtccatatatagaagcttattttttttttttgagatggagtctcgctctgtcacccatgctggagtgcagtggtgtgatcttggctcactgcaacctctgcctcccaggttcaagtgattctcctgcctcagcctccggagtagctgggattgcagcttagccaacacttcctccaggaagtcctccctgacccctgaggcctgggcaggcacctctttcgggtgcccacaatgtcctggtgtaaggagccatggtggctgggacactgaggaccgtgtgagggacaattaccagcacctcatcatggcactactctgtctgggttatacgttcctagtagagaggtctctcctccgctagtgaactctgaaggcagggactgggtctctctattcatggctatatccccaatgccaacaatacagtgggtacccaaacatgttagtcgaataattatagaggtatacaataggtacctactaaaagttagttggatgaacataagcatatacagaaagcattcaataaatgttgactggagatatagggatatacacccaataacgcacccagtaagtactgattgaataaatatgggtgtatatagtaagcactcaataaatggccaaatacaaccacaggagtatatactaggtaccaaataaatgttggttggataaaaatagacatatgtggtaggtgttcaatagatattggttgattaaatagagaactatacagtaggcattcatgtattgaataaatatagggatatacagttggtacccaatacatgcttgttggataaataatttttaaaaatttattttctggccaggcgcagtggctcatgcctgtaataccagcactctgggaggctgaggcgggcagatcacaaggtcaggagtttgagaccagcctggccaacatagtgaaaccctatctctactaaaaatacaaaaattagccaggcatagtggcacgtgcctgtagtcccagctactcaggaggctgaggcagaagaatcgcttgaacctgggaggtggaggttgcagtgagctgagatggcgccactgcactccagcctgggtgacagaacgagacttgtctcaaaaaaaaaaatttattttatatatttttttacctttcctatggtgttgatggttggataaatataggagtatatagtaggtgtccatatataaaagctattgaggccaggcgcggtggctcaagcctgtaatcccagcactttgggaggccgaggtgggcggatcacctgaggtcaggagttcgagaccagcctggccaacatggccaaaccccgtctctactaaaaaaaatacaaaattagccgggcgtggtggctggcgcctgtagtcccagctactcgggaggctgaggcaggagaatggcgtgaacccgggaggcggagcttgcagtgagccgagatagcgccactgcagtccagcctgggcgacaagagcgagactccatctcaaaaaaaaaaaaaaaaaaaaagctattgaataaacacaggggatagagtaggtgcccaataaatactggttagctaactataaaggtatatagtaggtgtccatatacagaagctatcttttttttttttgagacagagtctcgctctgttgcccaggctggaatgcagtggtgcgatcttggctcactgcaacctctgcctcctaggttcaagtgattctcctgtctcagccttcagagtagctgggattacaggtgcccactaccatgcctggttaatttttgtacttttagtagagatggggtttcaccatgttggtcaggctggtctcaaactcctgacctcaggtgatccacccgcctcagcctcccaaagtgctgggattataggtgtgagccaccacgcccagccagaagctacttttttttttttgagacagagttttgctctgctgcccaggctggagtgcagtgacggtgatttcggctcactgcagccttcacctcccgggttctggcgattctcatgcctcagcctcctgagtagctaggattacaagcacctgccaccatgcctggctaacttttgtatttttagtagagatggggtttcaccatgttggctggtcttgaactcctggcctcaagcgatctgcccacctcagcctcccaaagtgctgggattacgggcatgagccaccatgcccggcctagaagctattaaataagcatagggtatacaataggcacccaataaatgctggttggataaatataggggtatatagtaggtgtccacatatagaagctattgaataaacataggatatacagtaggtgcccaataaacactgatcggattaatacaggtgtatatagtagatgtccatctatagaagctattgaataaacatgaagtatacaataggcacccagtaaatgctggttggctgatatctgggaaggggcacccacctcgtcaggtgccgggtagagggtgagcagggccgggggccggtgctgccgtcgaagggtttcattgcgccggtccacatcttctggggccgcccgctctagcagagagggcagcaatgagtcagctgccaggttcctcaggtcgaagatgctagaggcaccactgcttcgaggggtgtcttccggggagcccgagccacgccgggagtcattctgccagtggagaatgtgcaagcactgagtgccagctgtatacaccttcacctcactctggtgagagtgtcctcatactcattctagagatggggaaattgagggtcagggggtgagggtcatcactctaagggtcacctgggggttttgcctaccctctttccagaaacttctgtctggagagcctcccaacttttaccattgctgggggaggctactccttatcccacatttggggctttaggtgatccttatctggtcaatcaaaacacatctacccaccctagggactggctccaagggcctgggctgggccaatgaaagccttccctgggactttgttcactgtcgccagggaaggagagagttcttcctgaccttcctgcactggatcaaatcccagctcagctctgtgacactgggtctctgacccccaactctaagggcctcagtttccctatgtacatctaaaaataataacaaaattagccggcatggtggcgcatgtctgtaatcccagctacccgggaggctgaggtgggaggatcgcttgaatccgggaggtggaggttgcagtgagctgagattgcaccactgtacttcagcctgggcgacagagtgagattccatctcaaaataattaattaattaaaataataataataatgaaaacaacaataatctttggaataattatggttggtatacagtaggtgctcagtaaatgttgattgacaaaatacaggctcacggcctctaagaaccttgctgtgcctcagtttccttacctgggtgtaatggctgccctgactcctaggatgaaagcagaggacacatatgaagccttcagtacaccctaagcactcaataaatgtttataattatgacccctaactttttactcatggggactgatgcaattccttttgagctcaaggctgtttgggtcatttcctgtcacatgtgaccaaaagctgaggccggagcctccacacataccccttcagtgaccccagccaggggcttcctcaccgagtcctcagggccggacctctcgtctccagaagcatcctgctcaaagacctggcgggggaggcccttctgtcgctcccgctgtgtgtctgtggtgacggggctgtatgctgcactcaggtactgatacctagcaggaaacggggctgggcaggtagggagggctgagggcccccagggggtccccagtgtgttctgacacacctacatggcaccttcaaagccaccgtccttgtgctccaccagacaagtttgcctgctcttgcagggacaatgggcagatacacagtaggaccggctgcagacatcagctcagcccttttgggttccgaaccccctgagctgcccctaagtcagactcaccttctgtggacaatgacccagtcctcaatatacatctccaccgcggccctcacctgggcatccagttttctgcagcaaaagaagatcagggtaaacagagacaaggcctctgtgaatccttctgctagcctgtaaggttagcactgtcctgcctattccagacaaggggagatggaggctcagagaaaaagcatggcttgtccaacgtcacggccaagccaggagctgaagtcgggctgttgatggggttggcagagacagagtggaatcacaggcagagagggcgtggggctgaacccactcatccttggggatcccgggctccgtggtccggcattcccggggctgcagcagcagctccaagtcatcagctgggaattctaccaggtccctgaggggcccgggctcagcatctggtggccggctcagaagtacatcctcaaagtccaggggctcgacaacttcagtcagtgggacctggattggagcaaagtggctgtgatcgcactacctaggaggctgagagtgggggcacgaggcaggggtgggtgcgcgctggcttcaaactcaaataggagggcggtgggagccatggagggtgttggagttacggaggaaccatggaggatgatgacctcagactctccacccccacctcagctttccctgccctgcccctccctccaggggctccaggaaggaaatcacaccccatgcctggaagggcagaaactaacagtggaaggaaagaaatgttgacagaggccaggcaagagacaattcctaaagcctccgcaaccctgtgggcaacatggccccacccctctcaggcgaaagtcactcccctccccaacttctccctcctccatccccatctaggtggtccaggtggctggagatgggggacatcaggagggagccactcccctgaccacccacagggtgacaagcagcggcagggagagtggccacaggaattggtgagactactaggaccaggacaggcactccctcccccgacactgctgggtccctctcggtttccccccaggacaggccacaggagggagggggtgggatagaacctaggccaaggaagcccctacctctgtctgagagagggcagagggctgggggcggaccccccaaatacttacccccagggagctgctgcagcgcctgctggagtggggggagccactgcgttcccgggacacctgcttccgcacctctgcggccaccgtcctggaaagatagggagggggccattggggacgggaaaactcaggcagcggagcggacagattctttctatgaggaaaatccagattgtggaacgaaataaataggccgagggccaagagaaccaggagtgctgaggctttaagggcccacagctccccagttcccccaacgcgttccccatcaagcacagatcaggagatgagaatgctgccaccagtggggtctgaagccatcacggactctccttcccctcccggctgggcctgtggccttccaggtctggagggaggcccacgggtccctggcctctgctccctcatctgggggacctctgtccatcctgctgttccccaacacacccagccctgcccctggaccccatccagaacatacatcccttcccatccttgctttggggctttggataagtcatttccacctctgagcctcagtttacccttctgtagctgatgccctgacttcacagagctgctgggcagagcggagcctggggcctggcctgaagtcacagagatcctgagatgaggccattgtgtcagaggtcaacctggcctgcggggcccagagctgggaggccttctaagtaaccccaagcaaccaaggtgggccctggggccttcctgggccacctggatctgagcaggccttcaaaatcagggaggatggccaggcatggtggctcacacctataatcccagcactttgagaggctgaggcaggcggatcacctgaggtcagaagttcaagaaggtcctggccaacaaggggaaaccctgcctctactaaaagtacaaaaattagccagactcctgtagtcccagctactcaagaggctgaggcaggagaatcgcttgaacccgggaggcgcaggttgcaatgagtcgagatcgcgccactgcaccccaacctgggcaacagagcaagactttgtctcgaaaaaaaaaaaaaatcagggaggatgggggtaaaggggcaagactcgcagtagaggggactctgcaggaatgtggagcagagccagtggggacagggatggctcagccctccaattcctctggctgagctcagaagtggatgagagagccatgcagttacctgagggtagagggtgcccagcagggggcacagcaggtgcaaaggacctgagttcgggctccgtgctttgagtgtggagactcctgctccctggggtctctgtgaaggcaggagctagggctgtgtgtcccccaaagagggccttgcacatactaggcacacactccttttttttctgagatggagtttcgctcttgttgcccaggctggagtgcaatggccacaatcccggctcactgcaacacctgcttcccgggttcaagcgattctcctgcctccgcctcctgagtagctgggattactggcatgtgccaccacacctggctaatttttcgtatttttagcagagacggggtttcacaatgttggccaggctggtctcaaactcctgaccttaggtgacacacctgcctcagcctcccaaagtgctgggattacaggcatgagccaccgctcccggcctactttttttttttttttttgagacagggttgctctgttgcccaggctggagtgtagtggcacgatatcggctcactgcaaccttcgcctcccaggctcaagcgatcctcctcccacctcagcctcagcctcccaagtagctgtgattacaggtgtgcaccaccatgcctggttaatctttctattttcagtagagacagggtcttgccatgttgcccaggctggtctcgaactcctgagctcaagcgatctgcccgccttgtacttttttttgacagaatgagtgagtcccttccagtcttcttctacaacttgcccaaatctgctgagtgaggggaagccccaggtcttctggctgtgtggctttgggcaggtaggataccctctctgggccttagtccctcttaaaatagacaagctgattgcctgggttttcagggcttactcccttctgcttcccaattccctgtgtaattgtaaatttttttctttttctttttgagacggagtctcgatctgttgcccacgctggagtgcagtggcgcaatctcggctcactgcaagctccgcctcccgggttcacgccattctcctgcctcagcctcctgagtagctgggactacaggcgcccaccactacgcccagctaattttttgtatttttagtagagacagggtttcaccgtgttagccaggctggtctcgaactcctgacctcaggtgatccgcccgtctcggcctcccaaagtgctgggattacaggtgtgagccaccttgcccggccccatttttgctcttaacagtcttggagtcttgcttctactgactgggggggttgagaaaagcgcttgtggggaattcaaaggatgtgaaaaattagggcttttgtcttcaaattcctaaagtcgggctgctgcctccagaaccgtgggcacacaggggctgggggataatttacaaaagatgctgggacaggggacaaagctgtgccctggtcccagctgttctgcagctgctgctccagaggagggagaggggaggagggacggctgggcctccagcttccttttccccttggccttggagagaggcccctgcagtgggaaaacgccgggtctgcaacaccacagccacagagccagctgactgcatcacaggactctgcacggagagccgtcaagcttggatgagtgaccatcagtctctcagcctcagggctcaggccactgaccaccttcttgagctgttctgagtgtaaggctttgcacacagtaagtgctcaattagggcttgctgccaccatgttgtcttcaaagacaatcctaggcagctgggatttctgaccctggttttttgttttcgttttttaaaaaaattttatttatttttttgagacagagtttagctcttgttgcccaggctagagcgcagtggcatgatctcagctcactgcaacctccacctccagggttcaagcgattctcctgtctcagcctcctaagtagctgggattacaggcacccaccaccatgcccggctaattttttgtatttttagtagagatggggtttcatcatcttggccaggatggtctcgaactcctgacctctggtgatgcacccacctcagcctcccaaagtcctgggattacaggcgtgagccaccgagcccggcctgtttttgtttttttgtgtctgtttttttgagacaggtcttactgtcgcccaggctggaatgcagtggtgcaatcacggcttactgcagcctcaacctcctgggttcaaggaatcctcctgcctcagcctcctgagtagctgggacaactgatgcacaccaccatgcttggctaattattattattattattattatttgtagaaatggggtctcactatgttgcctagtatggtctcaaactcctgaccttccgtgatcttcccgcctcagcctcctaaagtgctgggattacaggtgtgagccactgtgcctggcctctgaccctgtttttacaccaaggtgagatgtagatggcaaccatgagtgtcaggcatggtggcttgcacctgtaatcccagtgctttgggaggccaaggcgggaggatcgcttgagcccaggagtttgaggctgcagtgatggcaccagtgcactccagcctgggctacagagacactgtctcttaaaaaaaaaaaaaaaaaaaaaaaaagctgggcactgtggcttatgcctgtaatcccagcacttcgggaggccgaggcgggcagatcatctgaggtcaggtgtttgacaccagcctggccaacatggtgaaaccccatctctactaaaaatacaaaaattagccaggcatggtggcacatgccggtaatctcagttactcgggaggctgaggcaagagaatcacttgaacccgggaggtggaggttgcagtgagccgagattgcgccactgtactccagcctaggcaacagaaagaaacgctgtctcaagaaaaaaaaaaaatccatctataagccaggtgttgtggctcatgcctatactcccagcattttgggaggctgaggtgggaggatcacatgaggccaggagttcaagaccagcttgggcaacatagcgagaccccatttctaataaacacaaatgtacacacacacacgcacacagaaaaaaccatctgtgattattaagcaaggttgaaaatatgccaatccagcaattctactccaaggtgtggattactcagaaggaaacacatggccaagaatgttgacacctctgatcatgacagctccaaagtgaaactcacatgttcactgaccaaagagggaaataaatgcatgaggcaggggaatactacccagcaatgaaaaaggattgcaggcaatggcccagctgagccttcctgacatgatgctgagtgaacaaagttgggcacatggatgcaacacctcatgattcagtttatatgacaatctaaaacaggccagatcaggtaggggtgctggcatgcgggagggagccaggaaggtggagatagtccccatgggaaattgaccaagtggccatttcctcatttccttgccctttgctttcaaattattctttaaacttcgcacttttctttctctctctctctcttttttttttttccttgagatggagtctctgtcgtccaggctggagtgcagtggtgaaatctcagctcactgcaacctccacggcccgggttcaagcgattctcctgcctcagcctcctgagtagctgggattacaggcacccaccaccatgcccagctaatttttgtatttttagtagagatggggtttcaccatgttggccaagctggcctcgaactcctgacctcaggtgatccgcccacctcagcctcccaaagtgctgggattacaagcatgagccaacgcgcccggcctataactattctttaaacttttctttctctctcttttttttttcttgagacggagtctctgtcacccaggctggagtgcagtggcgtgatctcagctcactgcaacctccacgtcccgggttcaagtgattctcctgcctcagcttccccagtaattgggattacaggcactcgccaccatgcctggctaatttttatatttttcgtagagatggggtttcaccatctacagacccgaactcctgacctcaggtgatccacctgcctcagcctcccaaagtgctcggattataggcatgagccaccatacccaggctactttctttttctttcttttgagacagggtctcactctgtcactcaggctggagtgcagtggcgcaatcacggctcactgcagcctcaacctcctgggctccagcaatcctctcatctcagcctccccaggagctgggactacaggtatgagccaccatcacacctgggtaattttgtttcttgcagagacagggtctcgctatgttgcccaggctggtcttgaactcctggcctcccaaagtggtaggattacaggtgtgagccatcatacctggcccaaaatttgtagtttttggtatgaatgttgtatgttacagttgtttaaatggtaaaaaataacaatatatgtatgtgcttgtgtttgccaatatattcaaggatgggggagagagagagagagagagagatgtttacctgaaatttcagtggtaactttgggattttgaaatttgtcaataaatacctcattttcttcccacccctccaatgaatcattatttcttttctttttttttttttttttttgagatggagtctcgctctgtcgctcaggctggagtgcagtggcgggatctcggctcactgcaacctctacctcccaggttcaagcaattctcctgcctaagcctcccgagtagctgggattacaggcgtgcgtcaccacgcttttgtaaatttgtaaagttacaaaaagctaactttttgtatttttagtagagacggagtttcaccatgttggccaggctggtctcgaactcctgacctcaggtgatccacctgcctcggcctcccaaagtctgggattacagacctgggccgccgcgcccggccttttttttttttttttttttgagacagagtcttactctgtcacccaggctggagtgcagtggcacgatctctgctcactgcaacctccacctcctgggttcaagtgatcctcctgcctcagcctctggagtagctggaagattgtctaatattcgggttaatctggtatttgtggaataaatgactgaatggatgaacagatgaatataggaccagctctgagtatgtagacacctgggtgcccaagagcgaagttgctctggaagccctgggccactccctcacagttcactagggccccaggatcattctctactcttaccctgagctctacagtatccaaaacccctctttctcacttgagtaaaaaccaggacccaaggacatacagaccaaaatgcaaagaaacagacagcaagctgggcgcaatggctcacgcctgtaatcccagcatttgggaggccgaggcaggaggatcacttgagcccaggagtttgaggccagcctgggcaagatagtgagatcccgtttctacaaaaggttaaaaagttagctgagtgttgcagcatacacctgtagtcccagctacttgggaggctgaggcaggaggatcacttgagcccgggagattgagactgcagtgagccaaggtatcaccactgcactccagtctgggtgacagagcaagaccctgtctcaaaaaaagaaaaggaaaaaaaaaaaaagcctgggtgcagtggctcacacctgtaatcccagcactttgggaggtgggcggatcacctgaggtcaggagttcgtgaccagcctggtcaacatggtgaaaccccctctctactaaaaatacaaaaattagctgggtgtggtagtgggcgcctgtaaccccagctactcaggaggctgaggcacaagaatcgcttgaacccaggaggcgaaggttgcagtgagccaagattgtgccattgcactccagtttgggtgacagagcgagactctgtctcaaaaaaaaaaaaagaaagaaagaaagaaaagaaaaagaaaaggaaagaaaaagaaacagacagcaataatgtttgcagcctcaaagacgccaaaggtctaagacattttgaaagccaatttacagacaaagataatgatagaacataaaaattgcccagccattacgccccagccaccaagtctcatccctcctctgctgagaactccccatggctcccacctcacctggggtccaaagtcaaagtcccttgcacagcccacacgaccctgtacattctactcttactgtccccctccagctctctgttcctgcctcagggcctttgcacaaacccttcccactctttccccccacaaactggcctcgatcgatccctctctcatctccttgaggtttttgctcaaaggcacctgctcatccaggccttcctgacccacctcccgcatctcaagcagcccccaccctcccatcccccttccctgtcttcttgtccctacagcacttgtcactgacaggtaatctactcgatcaggcttctggtctctctccgccactatatcccaagagggggatcttttgtctccataagaccagggcccaacccacagggcagctctttcacctgggggcagtcaggacaggtcccccggggagaggatacctgagcttctgaacgcacccttgtcgcaaagaccccccgccaactgggggcgaggcttttcagccccagagagtctgatatacccctcccaggctgtgactctcacaatccccagtggccacggaaatggatcccccagcgcctggggcctgtcccctcccccgtctgcccaccagctggttctgtccccagcccccactccctccattcaatcacccatccatccccagcgcggtccagcccgtgacgggagagcctgaagcagaaggtgggggggcgtccacagctgtcccccttccccccccccgacagctgggcactggaccctggagggggaagggcacgggaaactcctcgaggggtttcaaacgccaccaaggagcccatctctgtccccaaatctcagagcctggagcctccctgccccaaaccaggcactgaggaaggaacagaaagtccggcccaccccgatctccgagagcgcggggacagtgaggggccgagaggcggacggggagcgcagggagttcagggggcgcccgtcatccgcatccccacgccacctcctccgggaagccctccggacacacccccgcgcgtcacggaggcagaacggcagccgccatcgcgctcccagccccgacgcgactcccatctgggacccccgccgggacccccgcggccctccccgccttctcccgctcccagccccggccggaggaagctggcgggacccgggccgaggcggaaaggggttgaattgggggcgcccgggcggggagggtcgcaccgccccggggcggagccgggccacgtgggggaggtgggagggggccccgcggccacactacctgttgatcttgtgcgcgaaggcgcggcgctcggaggcagccatggtcctcgcgtcccgccgccgccgccccgggccccggccccgccgccgccgccgcctcccggttctgggcagccggggcggggcggggccggcgcgggggcggggcccttccgggtggcccgggccgctccgtgctgcccctgcaggccggaggggtcgcctggagtcctgggggctggggaaactgaggctggggacggagaggaggccccgggatccaggctgggcgggccccagactcccgggctggggggacgctctttctaccctaggagaagggctggggaaactgaggctgaggagggaagttagggagaggaggcgctgggacccagactgggggtgccccagactcccgagctggcgggggcgctctttccaccctgggagctgggctggagaaactgagcctgaggagggagggagggaagggaggcgctgagacccgggctaggtggaccccaggctcccggggtttagtggggtggtcttaccaccccaggagcagggctggggaaactgaagctcaggagggagggagggaggggaggcgctgggacccaggctgggtaggccccagatttccggggtttggggggcgctctttctgccctctgactcctggctggaaaacaataacgatgttcatgtatctaataatcatacctgtaagtataatcgtggccgtgcatggtggctcatgcctgtaatcccagcactgtggggggccaaggcaggaggattgtttgagcccaggagttggagaccagcctgggcaacataatgagaccccgtgtccacaaaaaatgcaaaaattaaccaggcatggtggtgtgtgcctgtaatctcagctacttgggagtctgagggaggaggatcgcttgagcctgggaggtcaaggctgcagtgagctgtgattgtgccatttcaatccagcctgggtgacagagcgagaccctgtctcaaaaagtctaattgctaagatgtcattgagcctggccctgcaattcacacatgcagaagaaattattgttttcctccttttacagatgagtaaactgaggcacagaggtgttcgggtgcttgctcagtgtgactcacaggggtctccagcgcctgcattgtccgtgctcccagtctacagcatgggagtcagaggagcctggctaggcactggagtgctcggagatgtgccccaggtccaggtggtgggacctgagtgagccagtttgggagtctagactttcggggccgcctctaccaagaggaagaggtggggatgtcttggttaatctatggtctcaaatctctccccactggcctctctcccagcactgctgcagcatttttagagaattctccagccgacactcccctctggaggagctcacccctttctcacctgcatgcctctgcaccggcaggtccttcctcctggacagcccttctttccctggtcagcaaatgccccagggagaatttgaggttgaatcagacaaggccgtggctctgcctcagggcctttgcacgtgctgttctcattcccatctatgggttgctggcattttatcctctattatttatttatttatttatttatttatttatttatttatttatttattttgaggtggcatttcgctcttgttgcccagactggagtgcaatggcacaatctcggctcaccgcaacctctgcctcccaggttcaagcgattctcctgcctcagcctcccgagtagctgggattacaggcacccaccatcacacctggctaattttttgtatttttagtagagacggggtttcaccatgttggccaggctggtctggagctcctgacctcaggtgatccacccgcctcggcctcccaaagtgccgggattacaggaatgagccacatgcccaccctgagtcaccatgcacccccgagacacagtttcttgccttgctgcccaatgaatccatgtcagaccttgaacccacaggaaagaggcctggattgtaggggaacccccaaaccctgccagtcagacgcaggatagcatcctgctagtcaggccgcagtagggctgctcacagcctggcatgtgacatgtgcacacagcccacgtgcctgcccggagtggtccagccactttggccaggtggagctccgcccatcactccccgccatgccccaccaagtgtccccgccttgcctctcaggctgctgggagctaggctgggcaggaaatatgcagatgagcgaagatttgcacatttcttagcctagttccagtccagccccctttatatccggtctcccagcttcctttctcatcctccccccagcttgttcctgcatcagtggccaggaagagcctgggaacacctgcatcacttcagttccctcctctgttcagaaccttccatggctcccacctcactcagggtaaaagccaaagtcctcccacaacccgccgggcacagtggctccctgtcatcctggcactttgggaggccgaggcgggtggatcacttgaggtcaggagctccagaccagcctggccaacatggcaaaaccccgtctctactaaaaatacaaaaaatagccgggcatggtggtgggagcctgaatcccagctactcgggaggctgaggcatgaggatcgtctgaacccaggaggtggaggttgtagtgagctgagattgcgccactgcactctagcctgggcgagagtgagaccctgtctcaaaacaacaacaacaacaaaacaaccaacaaacaaaaccaaagtcctcccacaacccacaaggcccagcatgatcaaccctgtcacctccctggcttgcctcttccttttctttccctcattcactccactccagctgcccctgcctcctggatgcttctctaaacaccaggacacagctccactcaaggacctttgcatgttctgttccctttcccacatatgggcgttgccagtagcccccttttacagataaggaaactgaagaacacccagagaggggactcgccctaatgtagcctagtgaatcagtgtcagatccaagatttgactccagggagcctgatcccaaagcggttgtctctaaagtctcactgggtctccatcagacctggctgtgtgacccaggataaattgctcaacttctctgagccccagtttccttgtttgctccctgagagttcgtggttggtcacagcttgagacccagacatcaggaggtaggttgagccatggagcagcaaacttcagggccttgtcagggcccattccctgtcgaagcccaagggggttttgagctcagcgactccatgtcctgccttggtggaaacgctgcttcagagattgctccaatcaaaggccctaccccagatgcctcgagcacagtacccgccccagtgcctgccagacctgactggtgaggctatttctctccagagcaccaccagccctgactcagctgggtgtggctggggtgcccctgacagctgatcaaacagaggctgagcgtggtggcggggactttggcctcctctgctctactgcgtggagaacacgttgcggacatgaggctggagctggtggaccagggaggaggggctgtactggtccaggttagggatgataggcctggatggggtgaggatacaggggaggtgagaagtcggtgggctctgagcagatggctcactggtggctggacagtgagtccatctgcaagttagagtaagagaggagtcaaaaaccgtctccttcacccacgctgctgcctaatgctgctccctccacgtggaatgctgttccatccactcctcgtctgcctgcacccttctttgtcccttatatctcagcttggacatccctgcctttgcccgctgcctccgccatggaggccccagtcacgccccagttgctgggttacctttctctgtggggttcccagcacctgacatttagtaggagctccataaatactgactttttggttttgctctttttttttttttttttttttgagacagggtctcactctgttgtccaggctggagtgcagtggctccaatatggctcactgcagcctcctcctcccaggctcaagcaaccttcatacctcagtccccaactctgggactacaggcatgcaccactatggccagctaatttttctgattttttttgtagagacaggggtctcactatgttgcctaggctggtctcaaactcttggcctcaagagatgctgccaacttggcctcccacagtgctgggattacagacgtgccctcttttgttttcctgatctgctgctcagagcttgtccccgacctcgctgttggaatcactgtagcatcataatatgcttctgtatctttctgtgctgggtgcagctgcctccagacctttgcacaggccatcccctctgcccagaacatggttcccggactccttaccttaacagactttttttttttggagacagagttttgctcctgttgcccaggctggagtgcaatggcatgatctcggctcactgcaacctccgcctcccaggttcaagcaattctcctgcctcagcctcccaagtagctgggattacaggcatgcgacaccacgctcgactaattttgcatttttagtagagatggggtttctccatgttggtcaggctggtcttgaactcctgacctcagctgatccgcccgcctcggcctcccaaagtgctgggattacaggtgtgagccactgcgccctgccacctaaacaaacttctattcattcttcaggtctgatgcctcttgcaagccttccgtgaccacctctctcccctgtggaagctgggtcaagggctcctctgggctcccgtcccctccagcccctgggtctccccatcgcagtcctgatcaccctcagaataactgtctggttctgtggtgtctgctcctcccattccaatgtcagctccatgaggacagaaatttttctttttcttttttccttctttccatgacagggtcttgctctgtcgcccaggctggagtgtagtgatgcaatcatagctcactgcaatcttgatctcctgagctcaggcaatcctcctgcctcagcctcctgagtagctgtggtcccctcctgggaccacaggtgaatgccaccatgcccagctagtttttaaattgtttgtagagatggggtctcactacgttgcccaggcttttttttggagacagggtcttgctctgtcaaacaggctggagtgccatgacatgatcatagcttactgcaatctccaactcgtgtactcaagcgatcctcccacctcagcctcccaaagtgctgggattgcaggcgtgagccaccaccgttcctggcctctctgccttattcactgctgtatccccaacacccaggacgcagctgtgcatactataggtgctcagtaagagaatgagtgagccagagtagtacagggcctcactggccagaggacctcagtgcctctctgtcccctggtgtccgctattgataccatcagtgtggcaagagcaaccagtcccacagcagggagatagcttccttgtggagagggagtctgcctgggcctcccaaactgagaggtgtcgggggtgatggtgaagagggaggttgagtgaggctgcccactggcccctggtgcctgtggtgaaaatggtgggcccagccagcctaggacacttgccccatcctgcccataggcagaggaccctgctgctacgtggagaattgaggagcaagagcatgcaaggcacatccatgcaacaggcatccgcggagcatctaccatctgcaggcgccgactcaccccgggaggtggaatcatcatcccgggtcaccatcctacaggtgcaggaaactgaggctgagagaggagcagtcaccagcctcaaatcatacaacactggtgtgccaggcacggtggctcacgcctgtaatcccagcactttgggaggctgaggtggacggatcacttgaggtcaggagttcaaaaccaacctggccaacatgttgaaaccccttctctactaaaaatacaaaattagctgggtgtggtggtgtgcgcctatagtcccagctactcgggaggctgaggcaggagaatggcttgaatctgggaggcagaggctgcagtgagctgagattgcgccactgccctcacttcagcctgagcgacaaaccaagattccgtctcaaaaaaaaaaaaaaaaatcacataacactggagtcgtaggactcgaacccacgtctgtcaacttcagggaactctctcctgtggtttttcagatgcatttcggcaattggtgaattacttgagtgaatgaatgggtgtcttgcagtcagtggtgagctcagagtaggaacaggaatgagcaggatttggagtcccgagagacgtggattggagttctggcttggccacacagctggactgcgtgacctggacctctctgggcctcagtttcctcatctacaaagtgggcgcagcaacctcagtgctccactggcacggggccagtgaggtggcgtcaggagagcacaaaaccaagggagacactgacgtgttggattgttttttctgctgtttccggagccggggaaggaagccagaagccaacacagggtgtccaggcctgcctttgggagtttaagttacaaagacaaaagctgggcctagacaggtcagaggggcaggacacaggcttcctgtttttctttgaacagatggcccagccaccagatgcttgtctgtccggacatgtgtgcattgtccaaggaacttgcttctttttaaaatactttatttttagagatggtgtctcactatgttacccagcctggtctccgactcctggcctcacgcgattctcccacctcagcttcccaaagtgttgggattacaggcatgagccactacacctggctgaggccacttttgtgtaaaatatttggaaaaatgtatatatctgtatttccttggttttccagacattctcttcagacttccaagaaactggtgggactggaggacgagcaggagggatgctttgttttttaactgacagatttattgcttagagtcgtgtaaatgacagaagatacagcagacagaggagagtttccacccccgcccagagcagtttcccctattaacaacttgcatcctgctgaacatttgttataattgatgacccaatcttgatacatcattattcatatagtttacattccgatgcactgttcctgttgtacatcctactggtttttggcaagtgcatatgtttttttttttgagatggagtttcgctctgtcgcgcaggctggagtgcaatggcgcgatcttggctcactgcaacctctgcttcctgggttcaagagattctcctgcctcagcctcccgagtagctgggattacaagcacctgccaccacgcccagctaatttttttttgtttgttttgagacagaccctcgctttgtcacccaggctagagtgcaaatggcaggacctcggctcactacaacctctgcctcccaggttcaagacattctcctgcctcagcctccctagtagctgggactacaggtgcacaccaccacgcctggctaattttttgtatttttagtagagacacggtttcggccgggcgcggtggctcacgcctgtaatcccagcactttgggaggccaaggccggtggatcaagaggtcaggagatcgagaccgtcctggccaacatggtgaaaccccgtctctactaaaaatacaaaaaaattagctgggcgtggtggcgggcgcctgtagtcccagctactcgggaagctgaggcaggagaatggcgtgaacccaggaggcggagcttgcagtgagccgagattgcgccactgcactccagtctgggcgacagagcgagactccacctcaaaaaaaaaaagagacatggtttcaccatgttggccagactggtcttgaactcctgacctcaggtgatctgcccatctcagtctctcaaagtgctgggattacaggtgtgagccatcgcacccagccaaattttgtatttttagtagagacggggttttgccatattgaccaggctagtctcaaactcctgacctcaagtgatctgcccgccttggcctcccaaagtgctgagattacaggcatgagccaccgttcccagctatatatatatattttttgggacggagtcttgctctgtggcccaggctggagtacagaggcgcgatctcagctcactgcaacctctgcctcccgggttcacgcccttctcctgcctcagcctcccaggtagctgggacaacaggtgcccgccaccatgcccggcaaattttttttttgtatttttagtatagacggggtttcactgcgttagccaggaggatctcgatctcctgacctcgtgatccacccacctcagcctcccaaagtgctgggattacaggtgtgagccaccgcacccggcttttttttttttttttttttttttgagatggtgtcttgctctgtcacccaagctggagtgtggtggcgcgatctcggatcactgcaacctctatgtcccgggttcaagctgttctcctgcctcagcctcccgagtagctgggactagaggcatgtgccaccacgcccagctaatttgtatttttagcagagacggggttttgccatgttggccagactggtctcgaattcctgacctcaggtaatctgcctgcctctgcctcccaaagtgctggggttacaggcatgagccactgtgcctggccaaggtgcatatgtcttgtatctggtattatagtatcatacagtatcatattcacagtgcacagtatcatattcacagtgcacagtatcatattcgttgtgctaaaaatctgccaattcatctctcccttcccataggccctgggcaatcctgaccttttttttttttttttctttgatacagagtcttgctctgtcacccaggctggagtgcaatggcgcgatcttggctcactacaatcccgcttcctggttccagcgattctcctgcctcagcctccctagtagctgtgattacaggcacataccaccacgcctggctaatttttttgtatttttattagagatggggttttgccattttggtcaggctggtctcgaactcctgacctcagatgatctgcccaccttggcctcccaaagtgctgggattacaggcatgagccaccacgcctggcccactttttttttttttagacaaggtctcgctctgttgcccaggttggagcgcagagtggcacaatcataaactcactgcagcctccatctcctgggctcagatgatcctcccacctcagcctcccaagtagctgggactataggtgtgtgccaccacacccagctaatttttttttttttttgagacggagtatcgctctgtctcccaggttggagtgcagtggtgccatctctgctcactgcaagctctgcctcctgggttcacgccattctcctgcctcagcctcccgagtagctgggactacaggcgcccaccactatgcccggctaattttttgtatttttagtagagatggggtttcaccgtgttagccaggatggtctcaatttcctgaccttgtgatctgcctgcctcggcctcccaaagtgctgggattacaggtgtgagccaccacgcctggcttttttttttttttttctcttttttttgagatggagttttgctcttgttgcctgggctggagtgcagtggtgcgatctcggctcactgcaacatccgccttctgggttcaagcgattctcctgcctcagcctcccgattagctaggattacaggcgcctgccaccacacctggctaattttgtatttttagtagagacggggtttcaccatgttggccaggctggtctcaaactcctgacctcaagtgatccacctgccttgccctcccaaagtgctgggctttacaggcatgagccactcactacacctggccacacccagttaatttttaaaattggtagtagagataaggtcttgctatgttacccaggctggtctccaactcctgaggtcaagcaatcctctcaccttggtctcccaaagggctgagattacaggcatgagtcaccttgcccagcccctttcccccttaataacctccacccaggttgcgtgtggcggctcatgcctgtaatcccagcactttgggaggccgaggcggatgcatcacctgaggtagcgagtttgagaccagcctgaccaacgtggagaaaccccgtctctactaaaaatacaaaaattagctgggcgtggtggtgtatgcatgtagtcacagctacacaggaagctaaggcaggagaatcgcttgaactcaggaggcggaggttgcagtgagctgagatcgcgccactgcactccagcctggtgacagagggagactctgtctctcaaacaaaccaaaacaaaaaaccaaaacacaacaggtagctgggtgtggtggcacatgcctgtagtcccagctactcgggaggctgaggtaggaggatggcctgagcccaggaggcagaggttgcagtgagctgagattgtaccactgcactccagcctgggcaacagagcaagactccatctcaaaaaaataaataaataagaagaaggaaatagtcttggtgcaaagtctagctctgtgttcaaatcttaattttgtcacttgccagctgggaagcccaagtcctgtggggtccaagattttttatctggtgaatgggccttgcaggccccatctcacagagacaaggtgtcctaacaattgagtgaaataaggccagtaaaggggccaccaaaagatggaggttattttatttatttatttatttttttgagacagagtttcaccatgttggccaggatgatctcgatctcttgaccatgtgatctgcccgcctcagcctcctgaagtgctgagattacaggtgtgagtcactgtgcctggcctgtatttccttcttagcacaacctttcagagcaggtggcaatgactttgataaagctctgtcttttagatggaccacattttccttccttccttccttccttctttccttctgtccttcttttctttctttcttccttccttccttccttccctccctccctccctctctctctttctttctttctttctctttctttctttctctctttcttttcttgacagagtcttgccccatcagccaggctggagtgcaatggcatgatcttggctcactgcaacctccatctcctgggctcaagcaattctcctgcctcagcctcccaggtagctgggattacaggcatgtgccaccactcccggttaatttttgtatttttagtagtgacggggtttcaccatgttggccaggctggtctccaactcctgacttcaggtaatctgcccgcctcggcctcccaaagtgctgggattacaggtgcaagccactgcgcccagcctatggaccacattttcttagcccagtagctctgcaaagaaaaggaggtgacatcacgcagtagttagacacccagacacttgagttcaaatcctgcacctcagctcacaacaccagctttaatagacggttgctcacacctgttagaatggctacaatgaaaaataccaacaccaccaagtgctgaggaggattcagggaaactggaccctcatacgctgctggtggggatgcaaaatggtgcagctgctttggaaaatggtggttcttaaaatgcttaccatgcaagccctgtatgacccagcaaacccactcttgggtagtgacctaagagaaatgaaaatggatattgacataaaaacctgtatacggtcaggagtggtggctcacacctgtaatcccaacactttgggaggctgcagtgggtggatctcttgagaccaggagttcgagaccagcctggccaacatggtgaaaccctgtctctactaacaatagaaaaattagctgggcatggtggtgggtgcctgtagtcctagctactcaggaggctgaggcacaagaatagcttgaacccgagaggcggaggttgtagtgagctgagatggtgccactgcactccagcctgggtgacagagcaagactctgtctcaacaaacaagcaaaaaaacctgtacatgagctgggcatgggtacttgggagaccaaagtgtgaggatcacttgaggctgagagttcaaggttacactgagctatgattgcaccactgcactccaacctggggaacatagcaagaccttatctctaaaaaataaactaataatttaaaagcctcagtgtagtgcttcatgcctgtaatcctagcactttgggaggctaagggaggaggatcacttgagcctggagttcaaggctgcagtgagctatgatcacgtcaactgccctccagcctgggtgacagagcgagatcctgtgtctcaaaaaataaaaagtaaaatagaagaaaaggctgtgcatgaatgttgatagcagctttattcatcatcacccatggcttaaaacaatggagttgtccctcagtgggtgaatgtaaaacaaaccagggtctttccctacaatggaatattcttcagcaacaaaaatgagcaaactattgagacaggcaagtacttggatgaatctcaaatgcattatgctgcctgaaagaggccagactgaaaaggccacatagtgtatgattccagttatataacattctcaaaaagacaaaagtacagtgtgagatagcagacagatgagggcctgcctagggctcgggggaggggctgatgacagaggggcagcgccagggagcttcagggggatgcagcagctctgtctgatggccctggtggctcaatgaatctggacatgtgttaaaattcatagaactgtccacctctccgggaggaaattttactgtatttatacctagagagagagacatttgcagggggaatgggtccgtgagattctaggaatgtggttatttatccttgtaaatcccagtcacccctgctgagacaataggggtgacccattgtgcaacctgcagccagccagcccactttgcaaagttttctttctctttctttctttcttttttttttttttttttttttgagacggagtctcactctgtagcccaggctggagtgcagtggcatgattttggctagccgtaacctctgtctcttaggttcaagcgattctcctgcctcagcctccctagtagctgggattacaggcgtgcaccaccactcccggctaatttttgtatttttagtagacacggggttttacattgttggccaggctggtctcgaactcctgacctcaagagatctgcccgcctcagcctcccaagtagctgggactacagacgcataccaccatgaccagctaatttatttttatttttgtagagatggtgtcttgctatgttgcccaggctggtctcgaattcctaggctcaagcaatcctcttgcctcaacctcccaagtatctgggaccacaggagtgccaccacatctggctaattttattatttttaatttttaatttttaatttttattttattttattttttagtatttattgatcattcttgggtgtttctcggagagggggatttggcaaggtcataggacaatagtggagggaaggtcagcagataaacatgtgaacaagggtctctggttttcctaggcagaggtccctgcggccttccgcagtgtttgtgtccctgggtacttgagattagggagtggtgatgactcttaacgagcatgctgccttcaagcatctgtttaacaaagcacatcttgcaccgcccttaatccatttaaccctgagttgacacagcacatgtttcagagagcaagagattgggggtaaggttatagattaacagcatcccaaggcagaagaatttttcttagtacagaacaaaatggagtctcccatgtctacttctttctacacagacacagcaacaatctgatttctctttcctttccccacacttccccgccttccactcgacaaaaccgccatcgtcatcatggcctgttctcaatgagctgctgggtacaccacccagacggggtggcggccgggcagaggcgccccccacctgccggacggggcggctggccaggcgggggctgccccccaccttctggagggggcggctgccgggcggaggggctcctcacttctcagacggggcggctgggcagagacgctcctcacctcccagacggggtggtggtcgggcagagacactcctccgttcccagacggggtcgcggccaggcagaggcgctcctcacatcccagacggggcggcggggcagaggcactccccacatctcagactatgggcggcggggcagagatgctcctcacttcctagacgggatggcggccgagaagaggcgctcctcacctcccagactgggcggccgggcagaggggctcctcacatcccagacgatgggcggccaggcagagacgctcctcgcttcccagactgggtggcggccgggcagaggccgcaatcttggcactttgggaggccagggcaggcggctgggaggtggaggttgtagcgagccagagatcacgccactgcactccagcctgggcagcattgagcactgagtgagactccgtctgcaatcccggcacctcgggaggccgaggctagcaagatcactcgcggttaggagctggagaccagcccggccaacacggcgaaaccccgtctccaccaaaaaaaatacaaaaaccagtcagtcgtggcggcgcgcgcctgcaatcccaggcacttggcaggctgaggcaggagaatcaggcagggaggttgcagtgagccgagatggcggcattacagtccagcctccgctcggcatcagagggagaccatggagagagagggagagggagaaggagaccgtggggagagggagagggagagggagagctctttttaattttttttgtagaggccagagtcttgctatgttgcccaggctggtttcaaactcctggcctcaagtgatcctcctgcctcagcctcctacagtgctgggattacaggtgtgagccactgcacccagctggctatgtggtttcttgtgcatcactctatccctagtgcgctgcacacagcctggcacacagtaggtgctcagtaagtgctttctgagtgaatgattgggagaagcagaaagtattccaagggaggcatgggcaattgtttttttgtgtttttttgagatggagttttgctcttgttgcccagggtggagtgcaatggcacgatctctgctcactgcaacctccgcctcctgggttcaagcaattctcctgggttcaagcgattctcctgcattcaagtgattctcctgcctcagcctcctgagtagctggaattacaggcatgcgccaccacacttggataattttgtattttagtagagacggggtttctccctgttggtcaggctggtctcaaactcccgacctcaggtgatccacatgcctcggcctcctaaagtgctgggattacaggcgtgagcctccgtgcccagccaggcaattttgttaatcgctgaatcttccagtttccacatgcctcctcctctctccaacccttctcgccctaacttttccagattgtgcatgaaatttctagattgtgcatgaatgccctgcccagccctgcacattcagaattcatttgaattgaacctgagaggtggaggttgtaccgagctgagatggtgctactgcactccagcctgggcgacagaccgagactctgtctcaaaaacaaacaaacaagcaaaaaccacaaaaaacctgtacatgagctgggcaaggctgagtgtggtggctcacacctgtgatcccagtgcctccagagggtgaggcgggaggaatggcttgaggtcaggagtttgagaccagcctgggcaacatagtgagaccctgtctataaaaaaaataaagaattagccaggtgtagtggcgcatatctgtggtccctgctacttgggaggctgacaagggaggttcgcttgagcccaggaatttgaggctgcagtgagctatgattgtgccactgccctccagcctgggtgacagagtaaaagacaatagcaacaaaaacgctgaatgaaatacagcaaacatgcttttaagttatcagctaagttcacaaaaaagtaagagaaatctccaaggaacacagaggaggggaagttagtgctgaggcgccacattccttgaccctgtgagataaaggctgcagtgagccgtgttcacactgctgcactacagcctgggcaacagaacaaggctctgtctcaaaaaaaaaaaaagaaaaagagaaaaagaaacctcgtctccaaaaaaaaaaaaaaaattaaaaatcagcctgtagtcccagctattcaggaggctgcggtgggaggatcgcctaatcccaggagctccatgttgcagtgagctgtgatcaggccactgtactccagcctgggtgatagaacaagactccatcccctcccctcaaaataaaaataaattgaaaaaataaagaacaaattaaaacaaggtcattaggatggaccctaatccaaatgaccactatccttataaaatgaggaggtatgggctgggtgcagtggctcgtgcctgtaatcccagcactttgggaagctgaggcaggtggatcatttgaagtcaagagttcaagaccagtctggccaacgtagtgaaaccctgtatctacccaaaatacaaaaattagctgggtgtggtggcgcatgcctgtaatcacagctatttgggaggctgaggcatgagaactgcttgaacctgggaggtggagattgcagtgagctgagattgtgccactgcagtccaacctgggggacagaggaagactctgtctcaaaaaaagaaaaaaaaaaagaaaagatgaggtgatatggacacagagacaagcattaaagaaagactatgtgaagacacagaaacaaggcaactggctctaagccaaggagagagacctcagaaagaatcaaccctgctgacaccttattcttggacatacaccctccggaactgtgaaatgccctgttttataagcttccctgtctgtggtgcttggtcatgacagccttagcaaactcatacacgtcccctcttcccaactgctgcttcctggcatcaccacctctcagacaaagtacttgtattaaatccttgtttcagtggtggcttccacggaacccaaactaagacaaggccaccccagggtacaaaaggtggcatggggaaagaagagagtctctggggagcattgtcatgcagagaaaggaaaggagaggtcttcaaggaagtagagccagacctcagtttcagaagccattgtatttgctcccagaacccatgagaaaaaacttctgctgtggtggtggtggtgaatcccacaataggaagcttctctgtggttttgagccacaaaagaaagttgtagcccattgtttcatggccacaaaggaaatggtttccagttgggtgatggttcgcttgggttgctgggaggatctgacctcaaccttcctgctgcaccctgggcaatggtgcatcttctcttccggcatcttctctctcctgtttttcaagtttactcttttttttttttttttttttttttttttgatacggagtctcactctgtcacccgggctggagtgctgtggcgcgatcctggctcactgcaagctccgcctcctggcttcaagcgattctcatgcctcagcctcccgagtagctgggattacaggcatgtgccaccatgctcagtggctaatttttgtatttttagtagagacggggtttcaccatgttggccaggctggtctcaaactcctgacctcaagtgatccatctacctcggcttcccaaagtgctggaattacaagcgtaagccaccacacctggcccaagtttactctttctaaaaagaatttatttggggtttgctctgttgcccaggttggatgcaacctggtggtatgatcatagctcactgtagccttgaaatcctggattcaagtgatcctcctgcctcagcctcctgagtagctgggactacaggtgtccatcacctgacccagtaattaaaatttttttttgtagagatggggtcttgctatgttgcccacactggtcttgaactcctggcctcaaacaatcctattgcctccaatacatctggcccaggtttactctttttttttttagacagtatgttgctcttgttgcccaggctggagtgcagtggcacaatctcggctcacagcaacctctgcctcctgggttcaagcgattctcgtgcctcacctcagcctcctgagtagctgggattacaggtgcgtgccaccacccccagctaatttttttgtatttttaatagagacaaggtttcaccatgttggccagactggactcaaactcctgacctgaagtgatccacccgcctcggcctcccaaagtgctggaattacaggcatgaggcactgccgctcagcccccaggtttactcttttttttttttttttctttttttgagacagagtttcactcttgttgcccaggctggagtgcaatggcatgatctcggctcactgcaacctctgcctcccggtttcaagcgattctcctgcctcagcctcccgagtagctgggattacaggcatgcaccactatgccctactaattttgttttttttttttttagtagagacgaggtttctccatcttggtcaggctggttgtaaactcccaacctcaggtaatccgcccaccttggcctcccaaagtgctgggattacaggcatgagctgccgcgcccagccaggtttactcttaatttaaggttgagcccctgggctgcacactcagccttgtggatggatgactggctttgggccaaggtttggcttgcagcttctcctcactctcagcctagaggcaaaaacttttctttctttttgttaaaaacagctttactgagatatagtctacacagtatagaattcacccctcgaaagtgtacaattcaatggtttttcctatattcagaattgtacaaccatcacccagcctattttggaacactgtctcatctcctcaaaaagcagctccacagcctttagctatcattcccctatcccctcgtccctgccgcctcacccctaagcaactacgaatctactagtctggactgtcacatgagtgcaatcatacaacatctgtcatttcgtgtctggcttatttcacatagcttaaagtttgtaagattcatctgcagcctgtgtgactgtatcattcctttaaattttgttttaatttttaaaattgagatggaatctcccatgttgtccaggcttgtcttgaactcttcggctcaaacgatcctcctacctcagtctcccaaagtgctgggattacaggcgtgagccaccgtgtctggacattcattcctttttttaatttttttgagacagagtcttgctctgtcacccaggctggagtgcagtggcgctatctcagcccactgcaacctctgtctcctgggttcaagcgattctcctgcctcagcctcctgagtagctgggactagaggtatgcgccaccacgcctggctaatttttgtggttttagtagagaaggagtttcaccatgttggccaggctggtcttgaacacctgacctcaggtgatccgccctcctttgcctcctaaagtgctgggattacaggcttgagccatcacgcctggccgacattcattccttttaaaggctggataatattccattgtatggatagaccacattttatttatccgttcatcagtggatggcccctatggactattgttagcggtgctcttacgccatttgagttacacatttttgcatggacatatgatttcatttctcttgggtacgtatatacctaggagtggaattgctcggtcatatggtaattccacttttaatctttttttttttgtcctgtagaggtggattctcgctggtcttgaactcctggactcatatgatcctcctgccttggcctcccaaagtgctgggattataagcataaaccactgtacccagccctttctgtaattttttttttttttgagacagtttcattctgtcgcccaggctggagtgcagtggcacgatcttgcctcactgcaacctctgcctcctgggttcaagcaattctcctgtctcagcctcctgaggagctgggattacaggtgctcaccaccacgcccggctaattttttgtatttttagtagggttttagtagggtttcaccatgttggccaggctggtctccaactcttgacctcaggtgatccacccactttggcctcccaaagtgctgggattacaggccgtgagccaccgcacccggccctatgtgtaacctcttgagaagctctcagactgttctccaaagctgttgccccagctgacattcccaccagtggtgtatgagggttctgatttctttgtgtccttgtgtgaaaatacttctttaaccaattttacagataagactaaaatatactgaggcccagcaacgagctcaagctcccacagctactgagacacagagctggggcaggtgcccaggtatccagactccagacatcaggatttgctcatttcattgaggctttaacaaagactctgtggatctttattgagctcctgttacataccaagcactgaagacacacagtgaacaaaccaatgtagaaaggactcagatagcttaaaataataataggccagtgcccagtagcatacacctgtaatcccagcactttgggaggtcaaggcgggatgatcacttaagcccaggagtttgagactagcctgggaaacatggtgaaaccccatctctacaaaaaatctaaaacttagctggtcatgggtcaggcactcccaaagtgcagtgctcccactgtactccagcctgagcgacagagcgagactccttctcaaaaaaaaaaaaaaaaaaaaggttagctggtcatgatgggggcacatgcctgtagtcccagctattcaggaggctgaggtgggcggactgcttgcgcctggggaggttgagacagtagtgagccaagatcacgccactgcattccagccccagtaacagactgagaccctgccttaataaaaaggaaaaaaaaagttaaaaatttaaaaaatatttgaattcaggatggcagggactacatctgtattttttggcatcacaattggcatacactaggtgctcaatggatgcttattgaatgaaaggttgaatgaattagtgaatgagcagatgtcacccatcagaaagaatcactgaccttggagtcaggagacccatcttcaaatctgggctcctctgttccaggcaatgagcctcatctgttttttgttttttgagacagagtcttgctctactgcccaggctggagtgcagtggtgcaatcttggctcactgcaacatccacctcccaaggtgaatcaattctcttgcctcagcctctcgagtagctgggattacaggcatgcaccactgtgcccaggtaatttttgtattttttgtagagacagggttttgccatgttgcccaggctggtctcaaactcctgacttcaggtgaactgcccacctcagcctcccaaagtgctgggatgacaggtgtgagccaccgcacccggccaagcctcatttgtaaagtggacatgacaatagcacctacctctaagcatgggagtgaagattctagatcattctagcacctggcatgaagtaaaggcttcaataaatgtatacaccaactctcccagatcttctgaaagagaagcacagaaaacagtctgaacacagcctggaaggagaattcctgtgctgggtgggttattttccatgaaccccgaggacctggctaagtttcaggtcagagctgtttttttttcccccaaaattctctcatttgctctggtccaagtggagatcctggttcccagtgtcccccctgcccccacccccttcccgccaggcgcagcagggagcgtccgctgagacagcaagaaaacccacccaagaatgcagaggcctcagctgaggacagcacttgtaattcagcttggtcaccctttaaaaacaattgtaaggccaggagtataatcaatgtactcgtgcctgtaattccagctctttaggaggctaagatgggtgaatggcttgagtccaggagtttgagaccagcctggccaacatggtgaaacaccgtctctatcaaaaataataagaataataggccgagcacggtgactcacacctgtcatcccagcactttgggaggctgaagcgggcggatcacctgaggtcaggagtttgagtccagcctggccaacatggtgaaaccccatctctactaaaaatacaaacaattaacggggcgtggtggcacatgcctgtaatcccagctacctgggaggctgaggcaggacaattgcttaaacttgggaggcggaggttgcagtgagctgagatcgcgccattgcactccagcctggacgacagagcaagactccctctcaaaaataaaataaaataataataataaaggcagatctttttttttcttcttggtctttttatcctattatagtaataataactgcatagtgcatgctgagataagaggcagtggtcgctccaatcactgcctcttctgatgtctcgtggcctcttcccttctgtgtctaaatgttcctctcctctctttctctctctctctcttttttttttttgagacagagtctcgctttgccgcccaggctggagtgcagtggcgcaatctcagctcactgccacctctgcctctcgggttcaagcaattctcctgcctcatcctcccgagtagctgggagtacaggcgtgcaccaccacatccggcatatttttgtattttagtagagacagggtttcaccatgttggtcaggctggtcttgaactccagatttcaagtgatccaccttccttggcctaccaaagtgctgggattacaggtatgagccaccatgcctggctggatttttcaagagacgcctcaaatccagacttctccattgaaaatattttgaatttttattttattattatttcttttagacagagtctcactctgttgtccaggctggagtgcagtggtaccatcatggctcactgcagccttgaccttctgggctcaagcggatcctcccgcttcggcctcccaaagtgctggaattacaggtgtgagccaccacagcttgccttgttttttttttttttttgaaactgggtctcactgtgtcacccaagctggagtgcagtggcacgatttcagctctttgcatcctctgcctcccaggttcaagcaattctcttgcctcaggctccagagtagctgggaccacaggcgtgcaccaccacacctggcttattttttgtatttttggtaaagacagggttttaccattttgcctaagctggtcccgaactcctgggctcaagtgatcctcccaccttggcctcccggagtgctgggattacaagtgtgagccaccgcgcctggcctcgtgccttgatttttttaaagtcaaagtcaccagcaagccatgaacattatctctcttcttaaggaagaaagggaccagggtggtggcctaggcaacatagggagaccccgtctctacaaataatatatatataaaaaaaaacaactagctgggtggggtggtgcatggctgtggtcccagctactagggaggctgagctgggaggatcccttgagcctaggagctggaggctggactgagctatgatggagccactgtactccagcctgggcaacagagtgagaccttgtcaaaaataaaaaataaaaaaataaaaaataaaaataaataaaaaaaggaaggaaggaaaggtctccttcaccggatgtgaacccttttcccaaatcttgtgctgtgtttctcagcccccacaggcagctgaaatatgtcatcacccacccactgcttcctgtctgtgttagatttttgggagctgccataacaaatcatcaccagcttgctggtttaaaacaacaagaatttattcttttattttttgagacacagtctccctctgtcgcccaggctggagagcagtggggcgatcttaggtcactgcaaccactgcctcccaggctcaagcgattcttctgcctcagccttctgagtagctgggattataggcatgtgacaccatgcccggctaatttttgtatttttagtagagacagggttttgccatgttggtcaggctggtctcaaactcccgacctcaggtgctccgcccgccttggcctcccaaagtgttggaattacaggcgtcagccaccacgcccagccccctaaaatttattctttcactgttctggatgccagaagtctgaaatcaaggtgtcaacagagccgtgctgcccccaaaagctctggggaaggttccttccttgcctcttccaacttctggtggcccctggtggtcgctggattgtggccacgtcactccaatcactgcctcttccatcatcttgtggccttctcccctctgtctgtgtccaaatgttcctctcctgtctctctttctctctctcatttttttatgagacagagtctcactctattacccaggctggagtgcaatggtgtaatctcagctcactgcaacctctgcctcctgggttcaagtgattctcctgcctcagcctccctagtagcctggagtacaggcgtccaccaccacaaccagctaatttttctatttttaatagagagagggttttgccatgttagccaggctgacctcaaactccttgcctcaaaatccacccacctcactctcccaaagcactgggtattacaggcatgagccaccacacctggcctcctttttttttttttttgagatagagtcttgctctgtcacccaggctggagtgcagtggcgcgatctcggctcactgcaagttctgcctcctgggttcacgccattctcctgcctcagcttcccgagtagctgggactacaggcgcccgccaccatgcctggctaattttttttgtatttttagtagagacggggtttcaccgtgttagccaggatggtctccatctcctaatcttgtgatccacccgccttggcctcccaaagtgctggaattacaggtgtgagccacagagcctggtctttttttttttttttttttttttaaccaacaaccttatttatttatttttgagacaaggtcttgctctgttgcccaggatggaatgcagtggcaccatcatacctcactgcagcctcgacttcccaggctcaagacatcctcccaactctgcctctagagtggctagtactacagatacacgccaccatacctggctaatttttatttttttagagacagggtctcgatatgttgcccgggctggtcttgaactcctggcctcaagcctcctgtctcctctggtcttgccctcccaaagtgctgggattacaggcatgagccaccacccctaacccctctcctatgtcttataaagacaccagatattgaccagatattggatttaggacctgacctaaatctaggctgacttcatctcaagatgtttaaccaatgacatctgcaaagaccctgttttcagatagggtctcatctgaggctccagatggatatgaattttgtggtgacatgacttaacccactgtggtgctcacggtaaccagagctggacatgaagttctacaggaactgcgagaacattagcaggtaccgggccgagtcatttccctctattcccaccaggaggccttgtagtcctgttccttttacaacatttatttcttttctactgtggcaaaatatatataacttaaaattttgtcattttaaccattttaagtgtacagttcaggccgggtgtggtggctcacacctgtaatcccagcactttaggaggctgaggtgggcggatcacttgaggtcgggagtttgagaccagcctgggcaacatggtgaaaccccgtctctactaaaattacaaaaattagccgggcatggtggcacgctcctgtagtcccaggtactcaggaggctgaggcaggagagttgctcgaacccagtagatggaggttgcagggagctgagatcgcaagatcacgccactgcactccagccttggcaacagagcaagactctgtctcaaaaaaaaaaagaaaagtacagttcagcagcattaagcacattcacatcgctgtgcagccatcaccaccatccgtctccagaactttctcatctttccaaactgaaactctatccccatgaaacactcactccccacgctcctctccattccctggtacccaccattctgttttctgtctttatgaatctgatgactctagggacctcaaatgagtggaatcatgcaatatttgtcttttttttttttcgagacagagttcgctctgtcgcccaggctggagtgcagtggcgtgatctcggctcactgcaaactccgcctcccgggttcacatgattctcctgcctcagcctcccaagtagccaggattacaggcgcctgccaccacatacagctaatttttgtatttttagtagagacggggtttcaccatgttggccaggctccaaactcctgacctcaagtgatctgccagccttggcctcccaaagtgctgggattataggcatgagccaccgcgcctggctcccgttgtcaattcttttagttaagaatttgagcaggtgtggtggctcatgcctgtaatcccaggattttgggaggctgaggcagccagatcacttgagtccaggagttcaagaccattgctagagcctgtctctaccaaaaatggaaaaaaaaaaaaaaaaggcaggtgcggtagtgtgtgcctgtagtctcagctactcaggaggctgaggcgggaggatcacttgagccctggagtttgaagctacaatgaactatgatcacatcactgcactccagcctgagcaacaaagtgagatccagtctgcaaaaaagcaacaaagatttctgcattcattttctcagcttttgagcatcttttcctctagttggacaatcttatacttaatcagctactaatactttcaaagggcatttaaggccgggcacgatggctcacggctgtaatcccagcactttgggaggccgaggcaggtggatcacctgaggtcaggagatcgagaccagtctggccaacatggtgaaaccctgtctctaccaaaaatacaaaaattagctgggcatagtggggcatgcctgtagtcccagctactggggaggccgaggcaggagaattgcttgaacccaggaaatgaaggttgcaatgagctgagattgcaccactgccctcggcctgggcaacagagtgagacttcgtctaaaaaaaaaacaaaaaaacaaaaacaaagggcacttaagttgttgtttccaatcattcacaagtcaagcgaggcttaagagcaggcattagcaaaactacattctgccacccatttttgtaaataacaaaaccatctcatattataaataacattttattttgacagagtcacacttgttcatttacatatatttacatattgtccatttacatattttctatggctgcaatagcagagtcccaacagagacggtatggtccgcaaagctgaaaatatttactttctggctctttccagaaaaatctgccagctcttggcctatgtgcatttgaataaatctgtagtaggaattcctagaaggagaaacattccccacaaggttttaaaagtccatttgcggttgttacaggtccgcctgtaataaaatctccaaaagctatttatgaggtcttttttttttttttttgagacagagtctcactgtgttgccgaggctggcgtgtgcagtggcaagacctcggctcaacgcaacctccgcctcccgggttcaagcgattctcctgcctcagcctcctgagtagctgagattacaggcatgcaccaccatgcccggctaatttttgcatttttggtagagacggggtttcaccatgttggccaggctggtgtcaaactcctgacctcaagtgatccgcctgccttggcctcccaaagtgctgagattacaagcgtgagccactgcacctggccaaccttttcaatgtgtttaagtgagatacttgaggaatatgggatgggaacagtcttggccaccctgggaccagctgcccagacaacagagggaattagaacccgatcccccatgctaacaagaacagaagccccctcgagatgtgtcacctgcatgcactggtctggggccactcgctgcttcctgaactctcatcaggaccctccagtcctcctaacccttcaaggttgatacccctgaaaccctcccttctcatcactgcctgggtataccttatatactaaatatttttaatattatcaaggatcttggctgggtgtggtggctcatacctgtaatcccagcgctttgagaggctaagtcaggaggattgcttgagcccaggagttcgagaccaatctgggaaacatagcgagacccctgtctccacaaaaaataaaaaaattagccgggcgtggtggcacgtgccattggtcccagctactctaaaggccaaagcgagaggatcgcttgagcccaggagggtgaggttgcagggagctgagatcacactactgtacttccagcctgggagacaaagcgagaccctgtctcaaaaaacaaacaaacaaacaaaaacccatctcctggttctccttaatttcacttccctcttttccagccagaagctaaggtagctgaaggggtagaaattgcagatctttctttatgtagcaagagagaggaactgggaaagcagtgagtgtccctgtaggacaggggtcttcttattttattttatttttttgagacagagtctcgctttgtcgcccaggctggagtgcagtggtgcggtctcggctcactgcaacctccatctccccagctcaagcaattcttctgcctcagcctcctgagtagctgggattacaggtgcccacctgtaattaaccgcatccagctaattttgtagttttagtagagacggggcttccccatgttggccaaggctggtcttgaactcctgacctcaggtgatccacccgcctcggcctcccaaagtgctgggattacaggtgtgaaccactgtgcctggcctgacaggggtcttctgatcactcctcagtgcctcccaacccaccatacagagcacaaagtgttaaccctaaggcagaatgtgaacatggggaaacaaatgcaattttaaaaaacaaccagccaaacaaaaaaatccctaatggtggaaatgctgtttgtttttttttcatttggtagcaatgattaccatcatgctcctctcctgccacaatgacgtcagcccctgatgctgaaacttggtgacacttctgtgcttgtccccagtgagggctgaggtgcacaacctgggaactcctagaacaagtgactgatgccaaaggtgtggaccagcctctgcaaggacagacacctttcttttgtgtgtcccagactttttttttggatggtggattctgatttgcctccttccccaacgatggctattaaaatacctgaaaccataaaatgcccctttgtcaaggatggatctaggttttgtgaggcgtaaacaaatacatttctgccgcaaagtttacatgaacaagtgagcaggcgaacctactgccgcgctcctctctgaccttgaagggtgggcgcaagctcaggtctcattcattcactatttgttgttcagtgctcccaaacacccaattgttgcccttgacaacaaacacatgaatttaagaagaggagttcaggccaggcacggtggctcacgcctgtaattccagcactttgggaggccgaggggggtggatcacttgagatcaggagtttgagaccagcctggccaacgtggtgaaaccccatctctactaaaaatacaaaaattagccgggcgtggtggcgttgcgcctataatcccagctactcaggatcctgaggcaggagaattgcttgagcctgggaggcagaggttgcagtgagccgaaatcgcaccactgcactccagcctgggcaacagagaaagactccgtctgaaaattaaaaaaaaaaaaaaaaaagaggagagtttgttgactaatatgggtcgttgacataaatattctgtgtgtgattgtattcaacacatttcattttttggttgtgattttttttttttttttttttttttgagacggaatctcgctctgtcgcccaggctggagggcagtggcgcgatctcggctcactgcaagctccacctcccgggttcacaccattcttctgcctcagcctcccgagtagctgggactacaggcgcccgccaccacgcccagctatttttttttgtattttttttagtggagacggggtttcaccgtgttagccaggatggtctcgatctcctgaccttgtgatccgcccgtctcggtctcccaaagtgctggcattacaggcgtgagccaccgcgcccggctggttaattgtgctttttaaaaaatatctcccatccccataaatatgtacacctactatgtgcccacataattaaaaattaaacaattttaatcccctaaaaataaaaaaggagaccaagcatgtggagaaataaatgtctcaacacaccataagggtgtattggagtggcccttctatgattttgacaatgatattaaacgtcctggccgggcgcggtggctcatccctgtaatcccagcattttaggaggccgaggcaggaggatggcttgaacctaggacttagaggtcagcccaggcaacatagcgagaccgcgtctctacaaaaaaaaaaaaaaaaaaaaaaagcaagtatcttgcatttgcaattcgtcggatgcctgcaaagttccgtgggtgtgtgatgtaggaatctggggcacgggaagttattcttgcttcatttcctgacgctgaccggctgggcggggtccctggggcacccgggcacatttggacgtgtttggcagggagagtcctggcccagccccggcacgtagggccgcgcttccacgggccgccgccaggagacgcgcgaggctgtagatgcggctttgcagagaagctgggagggtagaggggctggggcggtcgaggggcggggctgcgtgcagccggcccagattcctttccggccagttccttccaggagctgctcccacgtctacagcgccgtctgctactcacccagctctcttgtatctgagcctcattttcccaccgtcctttaagcccgttttcccactgctcatttgcagccaagtttccatctcgcatctttgcgtcccccttctctgcaccctcctttgcacccccattttcctgctttcccttgagtccacatttcccagacctcctttgccccctacattttccaatgctctcttgcatgcccatttatcaccctcttttgtgcccccatttccaggccctcagcccctggttctgaggttccttacttcaaatgaccttttttttttttttttttttttcctgaaacggaggagtctccctctgtctcccgggctggagtgcagtgatgtggtctcggctcactgcaacctccgcctcccgggttcaagagattctcctgcctcagcctcccgagtagctgggactgcaggcacccgccaccacaaccggctaattttttgtatttttagtagagacagggtttcactgcattagccaggatggtctcgatctcctgacctcgtgatctacccacctcggcctcccaaagtgctgggattactggcgtgagccaccgcgcctggcttcaaatgacctcttaaataaaggtgtggaaggacacactcctggctgtgaacagcacccgtggtccaggaggagacagcactcctctgtgaacatcttgcttagttctacatgttccaagaagcaggcgatttgacagacattcattaaattaattaaagtgtaaggtattttctcccatttgaaccatccgccttcccccaatccatgcaggacctggacccagacacaccccagcccagggctggacagagaggggatcggggtggggcaatgtgaagctgctatggttagggtggggaggtatgggggcaaagtgggctacagactgcaggatctaggcctggaggtcttcagtgctgacatacagaaggtttttggtcctgaaatgctaactacatctatcaccatggagaaaagcccaatgacctgctacttgggaggctaaggtgggaggatcacttgagccagggaggtcgtggctgcagtaagccatgatcacaccactgcactccagcctgggcaatggagcaagatcctgtctcaaaagaaaaaaacccagtgaccaatggctcacagttccaggactctctgccttacaggttcctgccctcatgttactcttggggcttcaaagcctggtcttgcttcctgtgtggcctcaggcagttcccttggcctctctgagccctgtatgaaggatgggccaagtatgggcttgggcttgggaggcccggtggcttgtagctagatttctgcatcacagagcctctggatccattcattcattctccgcgggtttcttaagtactgcagtgccaggctttggggacacagctgtttttgtttttgttttgttttgtttgagacagagtctcactccgtcaaccaggctggagtggaatggcacgacctcagatcactgcaacctccacctcctgggttcaagtgattctcctgccccagcctcccaagtagctgggattataggcgtgtgccaccacacccaggtaatttttgtattgtttgtattgttagtaggtctcaaactcctgacctcaggtgattcgcccgtctccgcctcccaacatgctttgactacaggtgtgagccactgcgcctggcaggggtcacagctgttaataggacagcccaagttcccccctcccccgcttggatcccccagtctactaggagatgtcaactgtgcaagtggttagctctgggcactatgcccacagggtcctggtggcatctggagggtaccagggtagcataccatgcctgttctctttccctgctgtgacctgtttgaaggatgaggagccaacagggggcagtttggggcacctgatttccctggaccatgagccttgctccagaacccaattgtgatgtgataaaaggcttatgaccagggcagggggcagctgctgggccgccttggacaaccatcaggcagccaggacacagaggggcagagcaagtcagcattggcgccccttcctcagatccctatcatcttgggaaacagtagcccagaggttcaggaagatgttaacttaaatgttcagggtgccccagtctgttcagcatggctgaaatccacactccgtattcttccttgaagaaactgttatctttactcaatggcttcgtggctgtaagtatgtcacaatccaggcccctggtttgttgcagcccttcctccacagtcagctccctgaaagacagaaataagttgatccaaattggcatcgagatctgtggttccctggagaagcaggagggatgtagggcagacggaggaggaggagcagggagcgtggggacctccatcaaccgagagctggtgaaatccagcacagatgagtgtgatctgggggagcccaggtgggtgatggaagagcttggctctaagtcaaatcctgtagccgaccaagttgtttgggaaggccaggagaaagggttattttcttgatcttttaaatttgtcacatttttttccttaccgtaaaagtaacccgaaatgtacattgctaaggaattgtcaggccgggggcgctggctcatgcctgtaatcccaacgctttgggaggccaaggcgggtggatcacgaggtcaggagttcaagaccagccttggtcaatatggggaaaccccatctctactaaaaatacaaaaaaattagatgggcgtggtggcacgtgcctataatcccagctactcaggaggctgaggcatgtgaattgcttgaacctgggcggcagaggttggcagtgagccgagattgtgtcactgcactccagcctgggcaacatagcgagactctgtctcaataaaaaaataaaagaataaaaacataaaaagaagtaattgtcttcattgtagcatagtctaaggaaaagctgccaggaaagagaaggaaatgaaatatcactcctcctcttcacttgtaacattttaaagagaattaaggccggctgtggtgactcatgcctgtaatcccagcactttgggaggccgaggtgggcagatccattgagccaggagctcgagaccagctatagtgagatccccatctctatttaaaaaataataatacaaaataaagtgttattggaacatggccgtgctcacttatttggagattgtgaacagctgcttttgggctacaccaatagaactgcgtagtttcaacagacaccttaagtcctgcagaggccacaacatctgggtttttcagaaaaaaaaaattgctaatccctgtcctatgacattattttattttattttattttattttattttgagacggagtcttgctctgtcacccaggctggagtgcagtggcatgatctcagctcactgcaacctccacctcccaggtttaagcgattcttctgcctcagcctcctgagtagctgggattacaggtgcccaccaccacgcccggccaatttttgtatttttagtagagacagggtttcgccatgttggccaggctggtctcgaactcctgacctcaggtgatccacctgcttcggcctcccaaagtgctgggattacaggtgtgagccactgtggctggcctattttattttttgagacaaggtcttgatctgtcatccaggctggagtacagtggcacagtcatagctcactgcagtctcaacctcatgagctaaagtgatcctcccactgcagacacctgagtagctgagactacaggcacgcactactactggctattttttttttgttggggagagggtacagatgaggtcttaccaagctggtcttgaactcctgggctcaagtcttggccttggcctcccaaagtgctgggattacaggcatgagccaccgcactcacccagttctatttgtatacaactaacagattacttttcttcctttctggtttctgttctaaaggtgtctggcatcatcctagttggcctgggcattggtggtaaatgtggaggggcctctctgacgaatgtcctcgggctgtcctccgcatacctccttcacgttggcaacctgtgcctggtgatgggatgcatcacggtactgcttggctgtgccgggtggtatggagcgactaaagagagcagaggcacgctcttgtttgtaagttggatctgcacacagaccccagaactgcctccccacacacacaaatcttttattgtgcgtgttgcaaacaactttgcttggtgtcacctattttttttttttttgcggggacagggtttcactctgtcgcccaggctggagtgcagtggcacaatcttggttcactgcaacctctgcctcccaggttcaagcgattctcctgcctcagcctcccgagtagctgggattacaggcacccctaccatgccctgctaatttttgtatttttagtagagacgggattttgccatgttggccaggctggtcttgaagtcctgacctcgtgatccacccgcctcggtctcctaaagtgctgggattacaagtgttgagccactgctcccggtcgaattgttttaaactggagaggccagggtggcctggggtggagggtcgggggaacagagacaacccctcacctgcagggtataaggtcgggaggaggctgagcaggctcccaggccctctctccccgtgtgtcttttagtgcatcctgtcaatggttattgtcctcatcatggaagttacagctgccacagtggtccttcttttctttccaattgtaagtacagccctgctcctcccacatagcattagaaagataaagaaccaaggacgggcacagtggctcacgcctctaatcccagcattttgggaggctgagtctggtggatcacctgaggtcatgagtttgagaccagcctggccaacatggtgaaaccccgtctctaccaaaaatacaaaaaattagccaggcgtgatagcacgcacttgtaatccagctactcaggaggctgaggcaggataatcccttgaacccgggaggcagaggttgcagtgagccaagattgcaccactgcactccagcctgggcaacagaatgagactccgttaaaaaaaaaaaaaagatatagaaccaatagaagtccgcccctccccgccaggcacccatgatcgattgtggggacccagtgatggaggggcccatcacacgtgccacctttgatggtgtgagaagctgaaatcctcagcctgcctctccaagtcctcacaaaacctgctgagttcatttagttcatccctcttgggtttggtggcaggagaaggggagatgatcagaagtgtttgcatattgattggggttttgaaatgtattcaaaatagagggacaatttagcaaaatccatccaaatgacaaaagcttcagcactttgacctggcagtcccatctctgggaattattcaagaactcacttgctggtgtgcagaatcacattcatgccagggcatgtgaaagattgcaaagagggccaggtgcggtggctcacgcctataatcccagcactttgggaggccgaggcaggtggatcacctgaggtcaggagttcgagaccagcctggccaacatggtaaaaccccgtctctattaaaaatacaaaaaaactagccaggcctggtggcacatgcctgtaatcccagctattcaggaggctgaggcaggagaatcacttgaacccgggagccagaggttgcagtgagctgagattgtgccattgcactccagcctgggcaacaagagtgaaactctgtctcaaaaaaagaaaaaaaaaaaaaaagaaaagaaaagaaaaaagaaagattgcaaagaacctagtgagtatgaataagggtttaggcaagttaaaatacatcgacacagtggaatcctgtacatcaggtacagggaaggaggcggctctctgggcaccagatggaatgctctccaggatagagtgccgtcctcattggcatcctccccagaggctgaccctgaaacaataattcaaaggcatgtggtttatttgagaggtgatcccagaaaacacctgcaggggacatggcaaatgaggcaggtaagggaagacagcccacaaaaggggatgctgggcacagcatagaacatgcacctaggttattccactcaagtggagagggagctgggatattgatccaccaactccaaccagccattgatggagggctgctcccagggggcatgtgggctcagaggccagagaatcctcacttgctggcactagggagtcaggccagtaggcacagaactgacaagggccacagagttatgggcaggccaccaagagcccctgctactcctgtcgagaacagccagacgcagaaaaatgagtgcagcataaaccaaagaggaagaatagtgaaaatatactttgctttgacacacatagaagaacatctctttggggacacaggaaacagttaacagtcattggcatggagtgggaggaaacttttggctgggaggaaggggtgggagagagacttttcatggtctgttctcctgtgcatgtcaatttcgaaccacgtgcctctatcatcgctttgcaaaaggattttttaaacctttatttaaaaaacagaaaattaaatgtgccccttttgtgcagacagagattccgtggaagatgatattcaattctttaatggagttacagccacatcgtgggtgcagcagggtgtaggcgattccaaagagcagatgattcaaattcgtgtgcgatgggtacagagagatacgcttggctccagacccacgcgtctccctgtttccctctcttgtggtgggggcacagtagccttcgtgtgtcttcctctagcacagacccctgagctgagggtaggaaaaatgaaggcagcacgagggacgctcccacctcccactctatcctcaagaacctcggccaatgaacgggccactcttgctagttggggtactgatcacttcctgtcctctctgtgaggttggagatgtggccttggaacacaccttcgtgaccctgaggaagaattacagaggttacaacgagccagacgactattctacacagtggaacttggtcatggagaaggtgaggcttacttaaaaaaaaaaaattgtggtgtaaaggtacacaacatgggcgggcgaagtggctcacacctgtaatcccagcactttgggaggccgaggtgggaggatcacttgaggtcaggagtttgagaccagctgagccaacatggtgaaaccccgtctctactaaaaatacaaaaattacctccgtgtggtggcaggcatctgtagtctcagctactcaggaggctgaggcaggagaatagctcgaacccaggaggtagaggttgcagtgagttgagatggcaccactgcatcccagcctgggcgacagagggaggctctgtttaaaaaaaaaaaaaaaagccagtcacagtggcacatgcttgtggtcccagctactaaggaggctgaggtgggaggatcacttgagtccaggaagtcaaggcttcagtgaactatgatggtgccactgcactctagcctgggtgacagagcaagaccctgtatcttgtaaacatgaaatgtatcgtttaacatttttttttttttgagttggagtctcattctgttgcctaggctggagtgcagtggcgcaatctcagctcactgcaacctccacctcccaggttcaagcaattctcctgtcttagcctcccaagtagctgggattagaggcgcccaccaccacacctggctaatttttgtatttttagtagagacggggtttcaccatatgggtcaggctggtctcaaactcctgacctcaggtgatccacccgccttggcatcccaaagttctgggattataggcgtgagccaccgtgcccggccccatttaacaattttgaagtgtgcagttcagcggcattaagcacattcgcattgttgtgcgaccatcaccaccatctctagaacttccttatcttcccaaactaaaactctgtcccatgaaacgctcactccacattctccctccccaagcccctggcacccaccatgctcctgtctgtctatatgaatctgacgactctagggacctcctaggagtgaaatcaggcagtgtgtgtctttactaaaaatacaaacattagccaggcatggtggcgtgtgcctgtaatcccagctactcgggaggctgaggcaggagaatcgcttgaatccgggaggcagaggctgcggtgagccaggatcatgccactgcattgcagcctgggcaacagagtgaggctccatctcaaaaaaaaaaaaaaaaaaaaaaagggatttgctagattctatggcaattctgctttgtatatatacatatatatttatatacatatgtatataaatatatatatacacacatacatatatatatacacatacatatatatatatatatatacacacacacacacacacacacacacacatacatatatatattcacatatatatttttgagacaggatctcactctgttgcccaggctggagtgcggtaaggggatcatggctcactgcaacctctgcctcccaggctgaagcaaccttcccacctcagcctcttgagtagctgggactgcaggttcgtgccaccatgcctggctaatttttttttttttttttgtagatatggggtttcaccatgttgctcaggctgatcttaaaaactcctggcctcagccgccccgtccgggaggtgaggggcgcctctgcccggccgcccctactgggaagtgaggagcccctctgccccgccaccaccccgtctgggaggtgtgcccaacagctcattgagaacgggccaggatgacaatcgcggctttgtggaatagaaaggggggaaaggtggggaaaagattgagaaatcggatggttgtcgtgtctgtgtagaaagaagtagacatgggagacttttcattttgttctgtactaagaaaaattcttctgccttgggatcctgttgatctgtgaccttacccccaaccctgtgctctctgaaacatgtgctgtgtccactcagggttaaatggattaagggcggtgcaagatgtgctttgttaaacagatgcttgaaggcagcatgctcgttaagagtcgtcaccactccctaatctcaagttcccagggacacaaacactgcggaaggccgcagggtcctctgcctaggaaaaccagagacctttgttcacttgtttatctgctgaccttccctccactattgtcctatgaccctgccaaatccccctctgtgagaaacacccaagaatgatcaataaaaaataaataaataaataaattaaaaaaaaaaaaaaaaaaaactcctggcctcaagcgatcctcctaactcagcctcccaaagtgctgggattacaggggtagccaccacactggcctacgttttttgaggaactgccagactcctttccacagtggctgcaccattttccattcccatcagcaatgcaggagtctaatttctccacgtccttgacacctgtcattttctgggtttgtttttttttgagatggagtctcactctgtcacccaagttggagtgcagtggcgcaatcttggcccactgcaacctccgcctcctgggttcaagtgattgtcctgccttagcctcccaggtagctgggattacaggcgtgcactaccgtacctggctaatttttgtctctagtagagacaggacttcaccatgttggccaggctggtctcaaatttttgacctgaagtgatccacccaccttgacttcccaaagtgctgggattacaggtgtgagccaccgtgcacggccaattttctgttattttgatcattgccatcctaatgagtgtgaggtggtgagactcccatcttgattcttggcatttaaggagcaagactggcctttaagtgttatttaagcttttgagacaggtggttgaggccaggcagggagggttcaaagtggggaaagccattgcctgtctccaggagcatttcacacctgagttgtaggtccaggagctgctgtgggttgatggccaggctttgaaaggaacatgtgatagggaacaatttatttatgtacttaagacagagtcgtactcccaaaactcaggctggagttcagtggcgcaatctcggctcactgcaggcacaacttcccaagctcaggtgattcttgtacctcagcctcccgagtagctgggactacaggtgcacaccaccacacccagctaatttttaaaatttttatttttatttatttattttgagatggagtctcgctctgttgcccaggctggagtgcagtggcatgacctcggctcactgcaagttccgcctcccaggttcatgccattctcctgcctcagcctcctgagtagctgggaccacaggtgcctgccatcacgcccggctaattttttgtatttttagtagaaacggggtttcaccatgttagccaggatgatcttgatctcctgacctcgtgatctgtccgcctcggcctcccaaagtgctgggattacaggcgtgagccactgtgcccagcctaaaatttttagtagagacctttcagcatgttgcccaggctggtctcgaactcctgggctcaagtgatctgcctgcttagtcttcctaaagtgctaggattatagctgtgagccactgcgcccagcttcatttattaaaaaaaaaaaagttttgctccctgtgttgcccagactggtcttgaactcgtcgcctgaagtgatcttcctgaattggcttctcaaagtgttgggattataggcatgagtcactgcaactggctgatgcctttctgcatgctgcttttggcttctcaagcttgtgatggtacagaatgtctctctttcattcattcatacagtcctcccactaatatttattgagcacctgctatgagtcaggcactctatagggtttttgttagggtacaaaaaaaatccttgttggtgctgggcgcagtggctcatgcctgcaattccagcactttgggaggctgaggcaggtggatcacctgaggtcagcagttcgagaccagcctggccaacatagcgaaaccccgtctctactaaaaatacaaaaattagccgggcatggtggtgcatgcctgtaatcccagctactcgggaggccgaggtaggagaattgcttgaacccaggaggtggaagttgcagagagccaagatcgcgccattgcactccaacctgggcaacagacagagactgtgtctcaaaaaaaataataaaaataaaaataaaaataaaaataaaaataaaatccttgttgggccaggtgcagtggctcacatctgtaatcctagcactttgggaggctgagatgggtggatcgcttgaggctaagagtttgagaccagcccaggcaacatagcaagacccatctctacaatagataaaaaatgtagccaggcgtgatggcctgcacctgtagtcccagctactcaggaggcagaggagggagaatcgcttgagcccagaagattgaggttgcagtaagctacgatctcagcactgcacttcaaattcattcttccattactgacatgtgaatgaagagatgggcaatctctggttcttccgttactgacatgtgagtggagagatgggcaagaaaccaataactaaacattggtatcaggttcataactgctgtgaataaaaacaaggcagggccgggcacggtggctcacgccgctaatcccagcactttgggaggacaaggagggtggatcacttgaggtcaggaattcgagaccagcctggccaacgtggcataaacctgtctctactaaaaatacaaaaattagccaggcgtgggggcgtgtgcctgaaatcccagctactcgggagactgaggcaggagaatcactgaggagttcagcttttttttctttttagagacaggtcttgctctgttgcccagggtggaatgtagtggtgaggtcatagctcactgcagccttgatctcccgggctcaagagatcctctagcctgagcctcctgagtagctgggaataccggcatctgccaccatgcctggctaatttttaaatttttttgccgagatggggtctcaccctgttgcccaggctaggagttcagcttttaccctgagtgagatgggagccagggagggttctgggctgtgatgggatgtttgtaagaggatgtttagcacagtctctgggatattgtgaccatactagacggtagccatggtaaccgtgatttctgatgtttttattatttgaaagggactctccaagtatttcttctcctctctatagctaaagtgctgtggggtgaataactacacagatttttctggctcttccttcgaaatgacaacgggccacacctaccccaggagttgctgtaaatccatcggaagtgtgtcctgtgacggacgcgatgtgtctccaaacgtcatccaccagaaggtaactggagattttgtgtgttgccttgacagacccctgagggctggtgacttcatttttatttttatcttattttgagaaagagtttcacccttgtcacccaggctggagtgcagtggtgcgatctcggctcactgcaacctccgcctcccaggttcaagtgattctcccgccccagcctcccaagtagctgggatcacaggcatgcaccgccacacccggctaattttgtatttttagtagagatggggtttcaccatgttggccaggctggtctcgaacctcaggtgatccacccaccttggcctcccaaagtgctgggattacaggcatgagctactgtacccagcctttttatttatttatttagttagttattttgagatggagtttcactgtgtctcccaggctggagtgcaatggtgccatcttggctcactgcaacctccgcctcctgggttcaagtgattctcctgcctcagcctcccgagtagctgggattacaggtgtgtgccaccacgcccggctgatttttgtatttttactagagatggggtttcctcatgttggccaggctggtctcaaactcctgagctcaagtgatcctcccacctcggcctcccaaagtgctgggattacaggcatgagccaccacacccggccttatttttatttttttagagatagggtctcactctgttgcccaggcaggagtgcaatggtgcaatcacggctcactgcagcctcaaactcctgggctcaagtgatcctcctgcctcagcctcccgagtagctgggaccacaggcacgtgccaccatgcctggctaatttttttttaatttttatttttaatagagatgaggccttagtatgttgcccaggctggtctcgaactcctggcctcaagcaatcctcctgcctcagcctctcaaaatgctgggattacaggcatgaaccaccacacccagcctggtaactttaataaaaattgcttcttttgggggacccctgcaaagggggtcagggagaaagaaatcaactcttattgagtgttcagcttattttgacaacacagagcagggacttacggttaccttctctcagaaactgaggctcggggaggggacatcactagttcaagatcacagagctttggcagagttggaatttgaagccccattggcctgagtccattgccggcaccacactacctgccttctagagaccctaaatggagcaataaccatgaaaagtgatcatcctagcgggagtgagggccagccacgtgatggagcactcactttgtgagttttgtcccatcctatcccttgaggtggggaactactcttctctcattttgcagataaggaaactgaggtacagagcatttcctgtgtccagggagtaatgagctgggtttcaagccacaccccagttcccccttaacttcttccacgagtgaatgagcacagagatcttctctgagggaagaaatagaaatcagagccagggcaacatagcaaagtccccatcacaacaacaacaaattttgtttttttgagacggagtcttgctctatcacccagactggagtgcagtggcgcaatctcgactcaccgcagcctccgcctcccaggttcaggtgattctcctgcctcagcctcccgagtagctgggattacaggcgtgtgctaccacgcccagctaatttttgcatttttttttttttttgagacggagtcttgctctgtcgcccaggctggagtgcagtagcgcaatcttggcttactgcaagctctgcctcccaggttcatgccattctcctgcctcagcctcctgagtagctgggactacaggctcctgccagcatgcccagctaatttttttgtacatttttagtagagacggggtttcaccgtgttagccaggatggtctccatctcctgacctcatgatccgcccgcctcggcctcccaaagtgctgggattacaggcgtgagccaccgcgcctggcctaatttttgcatttttagtagaaacggggttttaccatgttggtcaggctggtcttgaactcctgacctcaggtgatcctcccacctcagcctcccaaagtgctaggattacaggcatgagccaccctgcctggctaaaaaacattttttatattagctgagtgtggtgacacatgcctaagtcccagctattctggtggttgaggtgggaggatcacttaagtccagtagttcaagaccagccttggcaacatagcaagatgccgtttttacaaaaaaattaaaaatcagctgggcatggtggcatgaacctgtagtcccagctaactgggaggctgaggcaggaggatcgattgagcccaggaggtcaaggctgcagtgagccgtgattgtgccgctgcactccggcctgggccacagagcaagacccctctctaaaatagacaaaaaaaaaaaaaagaagaagaaatatgaatcgttcattccttcatttgcactgaatggctcatgcagggaaataggccctgtggaaaatcagccaggttgagtcccaggcaggggcctcagagacagacacgggccagacactggcccactgggccctacacaacctacctgtcacctcctaacctttcccccttgctcactctgttccagcacactggcctcctcgctactgctcagaaacaccaggcacatgcctgcctcaccgcctttgcacaggctttccctctgcctggagtgctcttccttcacgtcttcctacctctcaagtctttactcaactggcactttctccgtgaggctgttctgacttcccatctataaaagtatccctcatcccagtgatcatgctctgtcttcataccctgtttctgtgtctttccagcatttatcaccactttacagtattatcactatgcttgccgttagctgttctccccactcaaatgtcagccccatgagggcaggaattttgtctgttttatacattgctgggttgccactgtccaattcagtgccaggcacttaaatacctattatgtggccaagtgtgatggctcatgcctgtaatcccagtactttaggaggccaaggcaggaggatcacttgaggacaggagttcaagaccagcctgaacaacatagcaagaccctcatcttcaggaaaaatttacagattaactgggtgtggtgttgttgcacacctgtaatttcagctgcttgggaggctgacgcaggaggattgcttgaacccaggagttcaaggctgcagtgagctatggtcatgccactgcatccagtctgagtgacaggacgagacccaatctaagaaaaaaaaaaactattatgtgaaagggggcacggaacagtgacaacagcaagttcaatgtggcccaagcctccagaggtgagatgtgccaggggcctagaagagggagctactctggaagtgcaggaagaaggaagaaggccgggtgtggtggctcacgcctgtagtcccagcactttgggaggctgaggtgtgtggatcacctgaggtcaggagttcaccaacatggtgaaacccccatctctactaaaaatacaaaaattagccgggcgtggtggtgggagcctgtaactccagctacttgggaggctgaggcaggagaattgcttgaacccgggaggcggaggttgcggtgagccaagttagcgccactacactccagcctgggcaataagagccaaattccgtctcaaaaaaaaaaaaaaaaaagtgcaggaaggagagaggaggccctaccatcttcaggaggatgccctgccaacgcactttgcctggtatcctaatatctctgagcctcagtttcctcatctgtaaaatggaggaaagaagagtacccaaattatggggttatagtgagaaatgagtaagaaaatatgtggacggagaagccactgaatacgtcagctcttctgttcatatgtaaagagcacttaaaaataactaacagttattgaatgctggctacatgtcagaccactgcaatgtatttcatgtagattcattcttttatatttatgtatttatttagagacgggttcttgctctgtcactcaggctggatggagtacagtggtgcaaacatggctcactgcagccttgacctcctaggctcaaatgatcctcccgtctcagccccccaagtatctgggactacaggcacataccaccacactggctaatttttttattttttgtagagacggggtttcgctacgttgtccaggtcaatctcgaactcctgggctcagggaatctgccagcctcggcctctcagagttctgggattacgggcatgagccatcgtgcccagccttattaattctttatttagagatggagtctcactctgtcgacaagctggaatgcagtggtacaatctcggctcactacaacctccgattccctggttcaagtgattctcctgcctcagcctcccgagtagctggaattacaggcaccgccaccatgcctggctatatttttgtatttttagtagagatggggtttcaccatgttaaccagtatggtcttgatctcctgacctcgttatccacctgcctccgcctcccaaagtgctgagattataggcatgaaccaccacgcccagcctatttatttatttttgagacagggtattgctgtgtcccctgggctggagtgcagtggcatgatcatggctcactgaagcctcgactggctgagctcaagcaatcctcctgccccaatctcccaagtagctgggactacagccacacaccaggctaatatttacattttttatagagagggagtctcactatgttacccagactggtcttgaactcccgggctcaagtgatcctcccatcttggcttcccaaagtgctgggattatagacatgagctaccatgcctggcctttgattcttttactcctcatgaaattcttgtaaggcagatccagtgggtgccatttatagatgggaaaatggaggtacagagaggtatagcgacttctccaaggtcacacagctagtaataatcgaggatgtccaaccacacttaattgccacactggaacattagcacagacaagtagaagggaatcatcggtatattcttttgggggaatgaggaggacagggaagatgctagggtggcggggagcgggtggcagtcaaatgagatggagggaaggccctcacggctctctccccgcttctcctcaaagaatctgagagtcgtctgagtggcctaatgagttggggttgatggggacttgcaatccataagcccctaaccacctcctgcttgttttggtgtttgtttcctcagggctgtttccataaactcctaaaaatcaccaagactcagagcttcaccctgagtgggagctctctgggagctgcagtgatacaggtaagacccagcctctctagggtctttgagctgttttattaagcacctactgtatgccaaacactgttctggtcactgggacacaggagtgaacaaaactaaaaaaaaaaaaaaaaagaaactcaacaaagaagaacaaactaaacccaaatcaagcagaaggaagatgctaaagattagagtgaaaatatgaaaataaatgaaatggagaacatcaataaaaccaaaatttgattctttgaaaagataaaacaggtcgggtataatggctcagcctgtaattctagcactttgggaggctgaggcaggaggactgcttgagcccaggagttcaaaatcagcctgggcaacatagtgagactccccatctctacaaaaacaaaaataagaaaattatccaggtgtggtggcagatgcttgtagtcccagctacttggggggctgaggcagggggatcacttgagcctgggatatcaaggctagtgaggcatgattgtgtcactgcactccatcctgagtgacagagtgagatcatgtcacaaaaaaagataaaattgacagaactttagtagactgaagggcaaaaaaagggaaagattactcaaattagtaacattaggaatgaaagagagacatcactactgaccttacagaaataaagcaactataagggaaaagtgtgaacctgtatgccaataaattagctaacctagatgaaatagacaaattcctagataaacataaactaccaaaactgactcaagaagaaatagaatatgtaaatagatctacagcaagtaatgacattaaattagtaaccaaaaaacttcccacaaagaaaatatcaggcccagatatcctcactggaaatattaccaaacttttaaagaattaacaccattgtttcacctgcaaactctgccaataaaaaagaggaagacatatttcccagtttattctatgacaccaatacaagatattgcaatgacataagaaagtaaaactacaaggctgggtgtggtagctcatgcctgtaatcccagaattttgggaggctgaggcaggcggctcacgaggtgaagagatcgagaccagcctgacgaacatggtgaaaccctgtctctactaaaaataaaaaaattagctgggcgtagtgatgcacgcctgtaatctcagctgagattacagctgggatttgggttgctgaggcaggagaatcgcttgaatctgggaggtggaatttacagtgagccgagattgcaccactgcactccagccttggcaacagagcaagactctgtctcaaaaaaaaaaaaaaaattatatcttaataaaaagacaagtaacccaactaaaatggacaaaggattcaaatagagatttttatccaaagaaggcatacagatggccagtaatcacataaaaaatgctctaccacccatcattaattagggaaatgccaataaaaacactttattctcactaggatggctaaagataataacaagtgttgccaaggatgtggagatatttgaatccttacacattgttgatgagattgtaaaatggtgaagccatttcctaaaatgttaaacacagaattattatttgtcccagcaacttctctcctatgtttataatccaagataattgaagacatgtatccatacaaaaacctttacgtaaatgctcatagcaggattattcataataatcaaaaagtagataaaacccaaatgtacatcaagtgatgaatggataaagaaaatgcatatccattcaataaaatattattcaacaacaaaaacttattgatatatgctacaacgtggatgacccatatcaacatcatgctaagtgtaagaagccagtcatgatattatatgattccattatataaaatgttcagaataggcaagtccatagaaataaaaggtagttagtgattgccagggaccagagggtacgggaagaatggggagtgactgataataggtatggcgtttctgtggttcatgatgaaaatgttcttaagttatatagtagtgatggtagcccaactctgaatatactaaaaaccattgaactgtatactttagaaaggtaacctgtatagtctatcaattatatctcaatgttatttaataaaaagtgctccatgcccctggttgcccaagaaatttttcctacatgctttctgcacattgactaccaacatagtagtgtcttttctgcaaatcgccactaactgagacaaggctctatcttaccagtctgggatatttatttctttggggtaatttttttcattgtacaaatttataatattgaatatgtacttgtaaactatacaacaccttcctccccaaggatcccagcaggaaacagcattcagcccccagatggtccatttaagatgttttcaggggcctccttgcagaggggtgacagggttcagtgaaatgaggcgcccaggagctaaagacatggggaacttttatttctcctaggcctgaaggctctagaaagggcatgaagagggtaggagcccagaaggaggggaagaaaagagggaggaagtggggaaggaataccctaccattctctcctcccgctcacccgtcttctcccggtgcttcctattggccaagcctaaccggaagttatgtggcagtggagtctggggaatatggtccgtagggctccggggagggccgaagtggagaggatgggccaggcgcggtagttcacgcctgtaatcccagcactttgggaggccgaggcgaatggatcacctgaggtcaggagctcgagaccagcctgaccaacatggtgaaaccccatctctactaaaaatacaaaaattagccgggcgtggtgctgggcgcctgtaattccagctcctcgggaggctgaggcaggagaattgcttgaacccgggagatgaaggttgcaatgagccaagatagtgccacagcactccaacctgggcaacagagtgagactccttctcaataataataataataataataataataataataataataggccaggcgcggtggctcacgcctgtaatcccagcactgtgggaggccgaggtgggcaggtcacgaggtcaggagatcgagacgatcctggctaacacaataaaaccccgtctctactaaaatacaaaaaaattagccaggcgtggtggcggccgcctgtagtcccagctactcgggaggctgaggcaggagaatggcgtgaacctgggaggcggagcttgtagtgagccaagatccgccactgcactccagcctgggcgacagagggagacttcatctcaaaaataaataaataaataaataaataaaataataataaataaaaaataagtggagacgaatgcactgtaaccacagtggctccaacttagcccaggcggttcttcagccatctgtaaaaccctgcccctcgcctttctggaacaggatgctccccttgtccccgtaactccagtatgattctggtttggaggtctctagcattggatccatgtttctttcttcacgcatttcagttgccaggaattcttgccactttgctgctgtttatcaagctgggctgacacccaggcctggagaagatgagacacctgggcccatctggctgctggagattcagtctcagttttatttctctgtggcactcactgcttctggaggggagactgttaataaaagatttgggaaccccctgtccagcctgacttctttctccttactttcatttttggcaatgattttacctcaaaatgcctgaatgagagactatgccctttctcatacaactttcctgttttgtaaattattcttggtgtgtgtgtgtgtgtgtgtgtgtgtgtgtggtttttttttttttttccttttgagagagtcttgctgtgttgccaggctggagtgcaatggcacgatctcagctcactgcaacctccacctccggggttcaagtgagtcttctgcctcagtctcccgagtagctgggattacaggcactcgctaccatgcccagctaattttttgtatgtttagtagagatggggtttcaccatgttggccaggctggtcttgaactcctgagttcaggtgatccacctgcctcggcctcccaatgtgttgggattacaggtgtaagccactgcacccagccagttttgtaaattattctgtgaaaaatctagaactttcacaaaagccaagaacatccatccagagaaacatacacatcacccaggttcaacaatgcaaagattgacatatttgctttatcaatcccctttttacccttgataaagtattttttcttttttaaattgacaagtcataattatatatatttatagggtacaatgtgatgttttgatatatgcatacaatgtggaatgattaaatcaagctaatgaacatatctataggctcacttatcatttttttgtggtgatacatctgtgatcccagcactttgggagactgaggtaggaggatcgcttgagcccaggagtttgagaccagcctgggcaacatagcaagaccccccccgccttttttttttttttttaagatggagtcttgttctgtcacccaggctggagtgcagtggtgtgatctcggcttattgcaaccttcccacattctgggttcaagcaattctcctgctcaggctcccatgtagctgggattacaggcgcctgccaccacgcctggctaattttttgtattgttagtagacatggagtttcaccaggctggtctcaaactcctgccctcaagtgatccgcctgcctcggcctcccaaagcgctgggattacaggtgtgagccactgtgcctggcctgactccatctctacaagacaacaacatcaacaaaaccctccaaaaaacaaacctcagacaatgtcatttcttccctttatatttcagtacacatctctaacgatatgttcatttgcgttcacaaccataacaccgttatcacatctaggataattaacattgcttgtttggcatcccttaatacctaggccattgttgagtcttcctaattggctcaaaacttttttaaagggacagggcctcactctatcacccatgctggagtgcagagatgtgattgttgctcagggtaacctctaactcctgggctcaagggagtctcccatgtcaactttctaagtacatgggactacaggcatgcgccaccacacccagctaattttttttcttttttcttttttcttttttgagacggagtttcgctcttgttgtccaggctggagtgcaatggcacgatcttggctcactgcaacctcagccttccgggttcaagtgactctcctgcctcagcctcctgcctagctgggattacaggcatgtgccaccatgcctggctaatatttgtatttttagtagagacggggtttcatcatgttggccaggattgtctcgaactcctgacctcaggagaattgcttgaacccaggaggtggaggttgcagtgagctgagatcatgtcattgcactccagcctgggcgacagagcaatacactgtctcaaaaaaaaaaaaaagtgtgaaatgcttggggagtgccagatgttctgggcttactgctttctttgtggttttggttatttaccctgttcctcttgtccacatatttcctgaaaagcatgagttaccagccctggctgtagattagaatcacctggaagctttaacaaactacctaaacctgaaccacagatcctgatcttttattattattattatttttttgagacagagtctcgctctgtcccccaggctggagtgcagtggcgcgatctcggctcactgcgagctccgcctcctgggttcacaccattctcctgcctcagcctcccgagtagctgggactacaggcacccgctaccatgcccggctaattttttgtatttttatagagatggggtttcaccgtgttagccaggatggtctcgatcttctgacctcgtgatccgcccccctaggcctcccaaagtgctgggattacaggtgtgagccaccacacccagcctaattttttgtatttttagtagagacggggtttcactttgttagccaggatggtctggatctcctgacctcgtgatctgcccgcctcagcctcccaaagtgctgcaattacaggcgtgagccactgcgcccggccagatcctgatcttctaatttaattgaactgggctgtgacgtgggtctggggatgatcctagtggtttttaagatatagtcatggtcacagctgagcatcaatgaactcaggggttcattcaatgaccatagcatcctgaaccaattctttcagaagaggttgcaaaatggtggtttatctaattccttttctttttcttttttttttgagacagtcttgctctgtcgcccaagctggagtgcagtggcacgatctcagctcactgcaacctctgcctcctggtttcaagcgattcttctgcctcagcctcctgaatagttggagttacaggtgcccgccaccacacacggctaatttttgtatttttagtagagacggggttttgccatgttggccaggctggtctggaactcctgacctcaagtgatcctcccacctcagcctcccaaagtgctgggattacaggcgtaagccactgcccccagccagaaataaacttttttacccacacttctgacaccaaacatgtggggttttccacaccaagtaattctccaattctctgtggacacccgctgggtgttctacaattcagttctgacaccaattacccagagttggtgtgtgaccccacagatttaagggctgagtcccacaaaactgagcttccctcacttcagaggtatcaagtattgagttcccaggttacccatatttctgtccaatgtggctacaaagtcagggggggttctcacaagccccctccctttcaggtttgataatttgctagaatgactcacggatctcaggcaagtgttttacttactactcctgatttattataaaggagacaactcaggccaggcgcagtggcttatgcctgtaatcccagcactctgggaggccaaggcgggcggatcacgaggtaaggagtctgagaccagcctggcctatatgatgaaaccccgtctctactaaaaatgcaaaagttagccgggcgtggtggcacacgccctgtaatcccagctactccggaggctgaggcagaagaatcgcttgaaccgggaggcggagcttgcagtgagccgagatcgcgccactgcactccagcctgggcgacagagcgagactctgtctcaaaacaaacaaaacaaaacaaaacaaaacaaaaaaacaaaaaaaggagacaactcaggaacagccaaatggaagtgataaagagggcaatgtgtgggggatggtgtgcagcacttccacaccctttcttggggaggggggcaccacccttccagcacctccatgtgttcatcaactcagaagctctccaaacctgtcatttaggttgtattttgttttgttttgttttgttttttgagacggagtctcgctctgtcgcccaggctggaatgcagtgacgcgatcttggctcactgcaagctccacctcccgggttcacgccattctcctgcctcagcctcccgcgtagctgggactacaggcgcccgccaccacgcccggctaatttttttgttgtattttcagtggagacggggtcttaccgtgttagccaggatgatctcgatctcttgacctcgtgacctgcccgcctccgcctcccaaggtgctgggattacaggcctgagccactacgcccggccaggacttttttttttttttttgagacggagtttctctcttgtcatccaggctggagtgcaatggcacgatctcggcacaccccaacttctgccccacttgttcaagcgattctcccgcctcagcctcccgagtagctgggattacaggcatgtgccaccaggcccagctatttgttatatttttagtagagatggggttttgtcatgttggccaggctgatctcaaactcctgacctcaagtgatcctcctgcctcagcctcccaaagtgctggaatgacaggcatgagccaccacacctggccaatcctagcactttgggaggccaaggcgggagcatggctggaagctgggagttcaagaccagcctgggcaacatagcaagatcccatctctcaatcactcaatcagctggatgtggtggtgcttgcttgtagttccagaaactcaggaggctgaagtgggaggatcctttgagtccaggagttcgaggctgcagtgagccatgattgtgccactgcactccagccagggccatacggcaagaccttgtctccaaaaaaaaaaaaaagaaaagaaaagaaaaagaaaaaagaaatgctggggagggagattgcagtactaaatcaggggagggggcagtgagaaagtgagatttgcacagtagcccaaaagaggaagttcagttaggggagctttgttgtattagtctgttttcctactgctggaaagaactgcccaagactgggtaatttataaaggaaagaggtttgcccgtgtacggtggttcacgcctgtaatcccagcattttgggaggccaaggtgggcagatcatgaggtcaggcgttcgagaccagcctggccaacgtggtgaaaccccgtctctactaaaaacacaaaaattagccaggcgtagtggagtgtgcctgtaatcccagctactcgggaggctgaggcaggagaattgcttgaacctgggaggcggaggttgcagtgagccaagatggcaccactgcactccagctgggtggcagagtaggactgagtctcaaaaaaaaaaaaacaaaaaaatacccaaaaaaacataagaggtttaatttactcacagttcaacatggctggggaggcctcaggaaatttacaattataacagaaggcaaaggggaagccagataccttcttcacaaggtggcaggaaggagaagagccgagagaaggcggaagaatcccttataaaaccatcagatctcgtgagaactcacttgctatcaggagaacagcatgggggaaccgcccccaggattcaatgacctccacctggtctctcccttgacacgtgaggattatggggattacaattccagatgagatttgggtggggacacaaagccaaaccatatcaactgtgactaccttgggtaagggccatccaggcagaggcagggggaacattctgggcaaaggccttggggcaggggcctggtatgttcagatagcagcaagtaggccagagtggccggaggggagcaagtgtggggaggccagtggagagatgagggtagggaagggatggatcagatcatgcagggccccgggggccacaggaaggacctcagcatttactgcaagtaaggtgggagccatcgaatgttctaagcagaggaggaatgcgctgtgactcaggtgttcacaggtgccctcttgctgctggggagagaactgagctttttactagaagtagttgagggaaatagtgtcctccctaccttccatataacagagctttccaaggtcaaggtggtggccatgggacccagtgggaggcagcccgaggcccggtgaggtttctgctgtgtcttgaagagcccttgactgatatctgcttagttgcaaatcaaaccccctttcccagaaacgcacttcactaatggaaataaaagcacaactatatttgggcacgacggatttaagtttttcttgttgagaagagtacatctttccaaactggacatcaaggaattgctacacagaagaaccacatccaggatagaaaggaccagccagagctcgttcagtagtgtatttcagaatcatcagggaggagccggtagcagaattatcccgttaacactgagaccacatttcacctgttacttatttttctaaatggagtaggagagaaagatgctaaaatgtgatcttgggaggagtcccccagtcccccgaaaaagaagaagaaaaaaaaaaagcagaactccaaacccctgtggtcatggcaatttcccatcaaaactgcccatgtaaaataaacacaagctgctaaaagtgaatgttaagaaggaaggcactggttagtgggtggtcctgaccaatcccctggagctggagaggggttttcccacggcctttggtttaatgtgtctgtaaactcaacaaacctccgtttccctgaggtaatctgcaaaaacatcagttttcagtccccagagaccatttccaattaaacctcaccccccaaatcattcaatgtaacatttgccttatttttagaagaaacaaatgttcccatattattcccagtttttgagagaatcctgaggcagctctctcggctgctacttgaagttgaattcttgaaaaatcttatgtaaacagaaagcttaggccaggtcaggagtaaaatgcagtcaaagctgtttctcatcacacaggtgattacaggttagctctgccctattcaagacaatctgatccattcctttttttgacagcagtttagagacaattggccaacaaaaccagcctggccaacaaggtgaaaccgtcgctactaaaaatgcaaaacttagatgggcgtggtggcaggtgcctgtagtcccagctacttaggaggctgagacaggagaatcgcttgaacccgggaggtggaggttgcagtgagctgagatcatgctactgcactgcggcctgggcgacgagcgactctctgtcttaaaaaaaaaaaaaacaaaaaaacctcagcaggccatactgcatcttgagaagtctttttgaagctactttagtttgactttagtgttaaagtagctaaaaatttttgactcccgcccacatattcagataccctcactttgtgcataggatttgtccattacacctcagtcatctaatttgttggtataaaagataccctcggctgggcgtgatggctcacgcctgtaatcccagcactttgggaggccgaagcaagtggatcacttgaagtcagtttgagacaagcctcaccaacatggtgaaaccccttctctactaaaaatacaaaatttagccgggtgtggtggcaggtgcctgtaatgccagctactcgggaggctgaggcaggagaatcgcttgaaccctggaggtggaggttgcagtaagctgagattgtgccaccgcactccagcctgggcaatagagcgagactctgtatcaaaaaaacaaatgaaaaaaagataccccactccaaagttctaagggtagcctctggtatgaagaaaccagggctccctagaaataaatctaaacttgaaccaggctttccccctcacacataccccagggaagaggctgagctcatgaaagctgcaggaagtcattttggcttcaggggctgggagagcagacacaacctctgaaacagagtcagggacgtgggaacataaaacatccacttagccatcctaacagtgctggtcctgtgaaggggtgttggttggtgtttgggagcaaagaaaaggtgctgcgcccctagagtttggaatctgatgggcagaaagtgcctctaaaccggaggtcaagatgtacatcttcaaactgcacacgtaacctctgagcagaagcccctggaggtggggaccccagcttcagagactccccggcactgatcacagtccatcccccccattcacataaggtcctgccactctcaggctgtctacaaagtacaagcagtgacagcaagttactcaatcctacctcctcaccccttccgcccaacccccagcatcccttagaagtgacccctagtttgaggctgtggtgagctatgattgcaccactgcactccagcctgggtgacagagccagaccatctcaaaaagaaaaaaaaaaaaaaagaagtgactcctccattagcaaaaattgtcacatccctgggccctgccgatgacaaggattgggaaatggacattgggtcttgaagggcccccctcaagtcggagcccaggtgcttacatcagaaagtcgccgacaactgcctgcggtggctgggaacgttgcttcatttccttttctagcaggatgcatgattgggcaagaacttgcttaaaacacaaccagctaaacagctaaacagggcctgggagggaggccccagccccaggctcctggctctgaggttaattaacttctggccgaaagcccagagccggagtgctaggggttgggcgaatctctgcccagtctaatgtggtccatagttccagaattcacttcaggatcagagatgtggtgaacacagcaaaaacagtggcagggtcgtgggtgatgtggatcttgggggaagcttggaaggcacttctggggtccctgaagccggggggttgaggggatctgactccctgtcccttctacaatgggaaaaggctgcttcaatgctgcttttcgcaagtagagggtctgcaggggtcaaagggatcaccatcccaccttggaatccagaaagttcgtgggggcaggctcagagaccagcctgcaggacctgagaaagaggcgccgccttccctggatgaactccaagaacccacactgtgcgaggaagatgaaccatcttccaccagcttgggaatatcagtcctgcccaacccagaagagacctggaaaatggttctaagctagaaggcaccacggatgcccctccatcagaaagagtgggacgtgtcacccatggccaccctcaacacaccctggaaagcagcaagctcatgcacgtcagtgtccctgggcctctgcctgccatgcagagctgagtccccatggtccgcagcctcccaccggggctgcctgaggaacctggcagccacggcgacattgtgaaggaatgagccatgcaggagtcggggagcagttgacaggagggaagggattgccctgagcttggagataaccactgtggctcacgcctcgatcacagtccctgccgaggcaggagaggggtgggtggggggttgggggccatctctagcagctgcagctgctgggctggggggctggagcatcccccacggccgggcctttcccgttgctgcctgagctggagctgggttccagggactcgttcatcttctcgcagatgacatccaccaggcgctcgaagacctgcttcacattgatgttctccttggcactggcttcaaagaactcgaaacctggatgaatgttaaggtggggacactcgtaagacccctgagggcagagtctcagctgtggcatcacagaaacctggcttctaagcctagttctgctctttatcctgctgtgggaccttggttgtgtgcctttgccactccaagcctcagtttgctcacctgtaaaatgggaatgatgatcctaccaatgataaaaatctgtggcaggccaggcgcaggggcttatgcctgtaatcctggcactaaaggaagctacggcgggaggatcgcttgaggccaggagttcaagaccagcctgggcaacatagcaaggccctatctctacaataaatttttttaaaaagtagatgggcggccaggtgaggaggctcatgcctataatcccagcactttgggaggccgaggcgggaggatcatttgaggtcaggagttcaagacccgcctgaccaacatggtgaaaccccatctctactaaaaagacaaaaaattagctgggcatggtggcacgcgtctgtaatcccagctactcgggaggctgaggcaggagaattgcttgaatctgggaggcggaggttatagtgagctgagatcacaccactgtactccagcctgggcaacagagcgagattctattaaaaaaaaaaaaatagaggggcatggtggcgttcacctgcagtctcagctactcggaaggttaaggcaggagaatggtttgagcccaggaggtcaaggcagcagtgagccatgatcacaccactgcacaccagcctgggtgatggagcaagaccctgtctcaaaaacaaaacaaaacgaaaccctgcggctgcagccatggtctggacaatcctaagatctctttgtcacaaggcagtggctgcaagagtataggtgggagggtacatgaagagttctgctgccctgcggccatggcagtgcccacaggtggctatagctcagcttccacccaatttctgctgcacagaaaggcatggtcaggagacccatcaagtcacattttccattgctttttttaaaagagaaacggtctctctctattgcccaggccggggtgtagtggtatgaacatggctcattgcagcctcaacctcctgggctcaagcgatcctcccgccttggccccctgagtagctggggctacaggtgtgccccaccatgcccggctaatttttcaattttttcttttgtagaggtgggggtctcgctatgttgcgcaggctggtcttgaactgctggcctaaagcgatccccccgcctaggcctcccaaagtgctgggtttaccagcgtgagccaccacgctgggcttcctgcatccttttaaggttcctgagggtctgcctgagaggagctgtccctgaatctccatgcagccccacctgccacatcaccaaggtaagccaggaattcagacaaacgcctgccacgttacacgtggccaagggtaagtggacctgtcttctctgtgcgtcatgctgaactatgaaaatggaatcataatgagttagctgtgtaattacccatttattatctgtctccgctactagaaagccagctccaggcaggcaggatttccgcccatggctgtacccagtgcccgacacagagagggtgcttagaaactgtctgctgaatggttgaatgaatgaatgggtaaatgaacaatagcaggggcaggacatgaacttagatctcctactgtcagcccagagatatcaaagccatcccactgtcttcctgggcaaatctggtgtttccttatccacgcgtggctttgcctcataccatctgtgttctttatttttctttttgttgagacagagttttgctcttgtcgcccaggctggagtgtaacggcacgatctcagcccactgcaacctccgtctcccgagttcaagcgattctcctgcttcagcctcccaaggagctgggactgcaggtgtgaaccaccatgccaggctaatttttgtattttcagtagagacagggtttcgctattttggccaggctggtatcgaactcttgacctcagatgatccacctgcctcagcttcccaaagtgctgggattacaggcatgaaccaccgtgcccagcttatttttctgatattaatcaggcgtggtggtatgcgcctgtaatcccaactactcaggaggccaaggcaggagaatcacttgaacccaagagttcaagaccagcctgggtaacatagggagaccctgtctctaaaacaaataaaaattttaaaaaggaaaaaaaatacattttttggatgtcattcaatagagaaatttactggagaaactagaaactacagaaaagtattaagacagcctataatcccagtactttgggagactgaggcaggtgggtacctgagctcacaagtttgagaccagcctgggcaacatagcaagacccagtctctaaagaaaatataaaaattaaggccaggcatggtggttcacgcctgtaataccagcattttgggaggccaaggtgagcggatcacttgaggtctggagtttgagaccagcctggccaacatgatgaaaccccgtctctactaaaaatgcaaaaattagctggccatggtggtgcacacctgtgatcccagctacttaggaggctgaagcaggaggatcacttgaacctgggaggcggaggttgcagtgagccgagattgtgccattgtactccaggctgggtgacagaacaagatattatctcaaaaaaaaaaaaaaaaaaaagaagaaggttggggggtgccaggcgtggtggctcacgcctgtaattccagcactttgggagacggaggtgggcggatcacgaggtcaggagttcgagaccagggccaatacggtgaaaccccgtctctactaaaaatacaaaatttagctttgtgtggtggcacgtgcctgcagtcccagctactcaggaggctgaggcagaagaattgcttgaacccgggaggtgtaggttgcagtgagccgagattatgccactgcactccagcctggcaacagagcaagactccatctctaaataaataaataaataaatattagccaggtgtggtggcatgcacccgtagtcccacctacttgggaggctgaggtgggaggatgacctaagccagggaagttgaggctgcagtgagctgaggtcatgccattgcactccagcctgggcaacagagtgagaccctgtctcaaaacaaaaacacaaagaaatgtatggagatagagataaaagtaatttgtaatctcatcacttggaaacaattactgttggcgttttgctatttagctttctagtctttattcatctttttttttttttttttaagacagagtctccctctgttgcccaggctggagtgcagtggtataatcataactcactacggccttgactcttgggcccccctcagtctcccaagtagctgggactataggggtgtgccaccacacacagccgatttttggtattttttataggggtggggcttcaccatgttgcccatgctggtctctaactgctagactcaagtgatcctctgccttgacctcccaaagtgcaaggattacaggcatgagccaccatgcccagcctttagtctttttctatataaatatgtcatttgttggggttaggtttgtaggggatgtgtgtgtgcacatgtatgtgtgtctggctttttttcctacaaaattggaatcaggccaggcgtggtggctcacacctgtaatcccagcagtttgggaggccgaggcagcggatcacctgaggtcaggagtttgataccagcctgaccaacatggtgaaaccccatctctactaaaaatacaaaagtagccaggcgtggtggcacatgcctgtaatcccagctgttcgggaggctgaggcaggagaattgcttgaacctgggaggcggaggttgcagcgagccaagattgtgccactgcactccagcctgggcaacaagagcgaaactccatctcaaaaaaaaaaataaaacaaaagaaaagaaaaaaaaattgggatcaaattctgtgtcctgctttgtatgccaatcttctttttgtgtgtgtgtgagatacaggctcactccatcacccaggctggaacgcaatggcgcgatcttggctcattgcaacctccgcctcccgggttcaaatggttctcatacctcagctttccaagtagctgggattacaggcacgtgccaccacacccagctaatttttgtatttttggtagagacagggttttaccatgttggccaggctggtctcgaactcctgacatcaagtgatctgcccacttcagcctcccaaagtgctaggattacaggcgtgagccaccgaacctggcctgtactccaatattttaaacataataacagaaagtgagaatccccctttaccccgagaccccagatataatccgcaagtaggtgtggaaagcacctccaagtattccagcccatcgcgggcgttaactgatttcaccacttccaggctaactggggatccagggccctgccccacagaacagagatccagtttctccaacaaagcaatggcaagaataaaaggggaaagggactggttatggcttagaggtcagcaaacctcctctgtaaaaggccagatcgtaaatattttaggctttctgggtcatatggtctctgtctcaattactcaatttcacgcttgaagcactgtttatacccttttctgtattgagacagcctgtaatcacagacgtgtgattaccataaaaatagcaaccatagacaatgcatcaacaaataggcatcaactgagcacgggtgtgagttcactcctgtgatcccagcactttgggaggccaaggtgggaggactgcttaagcccaggagttcaagatcagcccagacaacatggcaagacctatctcttaaaatttttttcttttttgagacggagtctcgctctcttgcccaggctggagtgcagtggcacgatctcggctcactgcaacctctgcctcccaggttcaagcaattctcctgcctcagcctcctgagtagctgggattacaggtgtgtaccaccacacccggctaatttttttgtatttttagtagagacggggtttcaccatgttggccagggtggtctcaagcttctgaccttgtgatccacccgcctcggcctcccaaagtgctgggattacaggcatgagccactgcgcccggcaaaaaaatttttttttaattaggcaggtgtggtggagtacacctggcatcccagctacttgggaggctgaggtgggaggatcacttgagcccaggagttggaggctgctttgagttatgatcgtgccactgcactccagcctgagcaccagagagagaccttgcctcaaaaaaaaaaaaaaaatttaaaaaataaatggttgggaggttgaggcgggtggatcacctgaggtcaggaattccagaccagcctggctaacatagtgaaaccccatctctactaaagatacaaaaattagccaggccccgtggtggtgggtgcctgtaatcccagctactcaggaggctgaggcaagagaatcacttgaactggggaggcggaggtggcaatgagccgaaatcacgccattgcactccagcctgggcgacaagagcaagactccgtgtaaaaaaaaaattcttttaaaagggtatagctgtgtctcagaaaaacttcatttatagatacaaatttgaatttcatataaatttcccatgtcatattattttttttcaaccacttaaaaatgtaaaaaccaaccaggtgccgtggctcatgcctgtaatcccagcactttgggaggctgaggcaggccgactgcttgagcccaggagttcaagaccagcctgggcaatatagtgagacctcatctctacaaaaaataaaaataaaaaattagccagtgtgctggcttatactagtagtcccagctacttgaaaggctgaggcagcagaatcacttgagcccaggtgtctgaggctacagggagctttaaacttattttgtagagttggggtctcactatgttgcccaggctggtctctaacccctgggctcaagcaatcctccctcctcagcctcctaaagtggtgggatcacaccactgtactccagcctgggtgaaagagtgaggctctgtctctattatttaaaaaacgacgacgacaacaaaacagctggagttgcatagtgaagtgtttacagacaaaaggtttcgatgtcaagggtttgctctcaatgctctaggaaaaaaaggaaaagtattttgggggaatagatgattcaagattgaaaaaatgttgagacctaattaagctgaataatgttttatcaaagtctattatacattcctttctacttgtgaatgtatttgaacttttcttagatggagtttcactcttcttacccaggccggagtgcaatggtgcgatctcagctcacacaacctccgcctcctgggttcaagtgattctcctccctcagcctcctgagtagccggaattacaggcatgcgccaccacgaccggctaattttgtatttttagtagagatgaggtttcaccatgttggtcaggttggtctcaaactcctgacctcaggtgatccgcctgcctcggcctcccaaagtgctgggattacaggcgtgagccaccacgcctggccgaacatttctcattttatttcattgttttttgagacaaggtctcactctgtcacccaggctggcatacagtggtgcaatcttggctcaatgcaacctctgcctcccaggctcaagcgatcctcccacctcagcctcctgagtagctgagactataggtgtgagccaccatgcttagctaatttttgcatttttttgtagagacagggtttaccatgttgaccaggctggtctcaaagtcctgggcttcagcgatctacccaccttgccctcccaatgtgctgagagtatttgaacatttttatcacaaaaagttattattttcttccttttttgagacagggtctcgctatattgcccaagctggtctcaaattcttggcctgaagcaatcctcctaattcagtctccagagtagctgggattacaagcacatgccaccattcctggccaaagttatttttttaaaaaagtgtaggccgggactataaaaaccaaccaggtgcagtgactccatctcaaaaaaaaaaagtgttaagaacatctgtgaatcaagctggcagatttcttgcctcatgtgtccaaagaaatatatgtaaaaatgactgctgcagctgcatttgtcagaggaaaaggctagaaataatctccatggctgtcaacagaggaaaaggttaaggaaacacgaaatggaatagtacacagccatgcaaaagaatgagccagctctggggctgatggagaaatatttctttttttttttttttttgagaaagagtcctgctcttctacccaggctggagtgtagtggcgtgatcttggctcactgcaagttccgcctcccgggttcacaccattctcttgcctcagcctcccgagaagctgggactaccggcgcccaccaccacgcctggctaatttttttgtatttttagtagagatggagtttcacagtgttagccaggatgttcttgatctcctgacctcatgatccgccctcttcggcctcccaaagtgctgggattacaagcgtgagccactgcgcccggcagagaaatatttctaggatatattatttagtagaaaagttcaaagtgcaggaaagggtatatacagtagggaacatctgtgtaaaacaaaaaagtagccaatgtgttgtcaatgcctgtgggtgctcagcatatttctggaaagagatacaagaatcagagaagctgggagaccagaactgcaggtggggagtgggttattgccttagtctcttcctgtgccttctgaattttgcacatagggtgctggcttggatggggcttatgggaaagctggggttaaaaactgattgcaagcatcagtttctttctttcctttttttttttttcttttgagacagagtctccccccattgcccaggctggagtgcagtggcgtgatatcggctcactgcagcctccacctctcaggttcaagtgattcttctgcctcagcctcccaagtagctgggattacaggcgtctgtcaccatgcccggctaatttttgtgcatttttagtagagacggggttttgccatgttggccaggctggtctagaactcctggcctcaggtgatctgcctgtctcagcctcccaaagtgctgggatttcaggcatgagccaccacgcccggccacaaataaagttttattggcaaacagtcacacccattcatttatgcattgtctgtggctgctgtcatgcagagttgggtagttgccatagagactgtatggccaaaaatatttactatctggccctttaagaaaaggtttgctgactcctggactaaagaaagcagtcgtatccactattttgctagaacaaaacagccaggcacggtggctcacgcctgtaatcccaacacttcgggaggctgaggcaggtggatcacctgtcaggggttcaagaccagcctggccaacatggcaaaaccccatctctactgaaaatacaaaaatgagtcaggcatgctgcgcacacctgtaatcctggatactcaggaggctgaggaaggagaatcacttgaatgcaggaggtagaggttgcagtgagccaagatcgcaccactgcactctagcctgggcaacagagggagactccatctcaaacaaaaacaaaaacaaaccataaagaacatccccttgggctggtgtggtggctcatgcctgcaatcctagcactttgggaggctgaggagggaggatcacttaaggtcaggagttcgaggccagcctgggaaacatagcgagaccctatctccacgcaaaattaaaaaaaaaggccaggcatggtgcctcacgcttgtaatcccagcactttgggaggccaaggcgggcagatcacgaggtcaggagatggagaccatcctggctaacatggtgaaaccccatctttactaaaaatataaaaaattagctgggcatgtggcacgcgccagtagtaccagctacttgggaggctgaagcaggagaattgcttgaacctgggaggtggaggctgcagtgagccaatacggcaccactgcactccagtctgggtgacagagtgagactccaactcaaaaaaataaaataaacctgggaagcggagcttgcagtgagccgagatcgcgccactgcacttcagcctgggcgacagagcgagactccgtctcaaaaaaataaaaaataaaaaaataaagaacatccccatccttttccatggctgcatagtattccaccatgtgaatatactttatgtccacttggttctccaactgtgagacacctgggggggatctgtaggtttcactcctactaatactactactacactccacacaccatatcccacatgggtgaggatatctctaggatcaatttccagaaatggttttgctgggttcccaggggataggcagtggggcagtgggagttcctgcgcgtggatcccctgcaattagacgggacatgtggcatacacatgggtatcttcctgggcagatcctcaaaggatcagtgactgggttggaccctgaatcagaggatggggatgagggtttggttctgggagaccagggcctgtggcccaggctgggcactaaccaaggtcgtcggcgagcctccggccatcctcagcaggcacaacacgttcgtcctccaggtcacacttgttccccaccaggatgacctgggcgttgtcccaggagtaggtcttgatttgcgtggccctgcagagttaccagtggtgagccatgagccgggggggttaggggtcagaggagagggcaaagatcaggggtccatgatcagcaagcactcaccagtcctgcacagcggcaaaggattcctgattggcgatgtcatacatgagcaggaagcccatggctccccggtagtaggccgtggtgatggtgcggtagcgctcctggcccgctgtgtcctggacaaatggcagtggcagttggctgggaactacctgtttcccagtccacccctgtcttagaggggcactgccctgtactcatagccccagccttacgggggagacacagacttgcttgtacaacctctggtctgatggagaatacacagatcctgccctcacaaccccagtctgatgggggaggcatggattcattaccaagggatctccccagtctgatgagggagagacttgggcttgcccttgaggggttccaagtctcaggggtcagtggcctctcacagacttatgagcccctttgaccttgtctctaagaaccaactgggccagatggtaccatcctgacaggacaccttggtactcttgctaccacgatgattgttaccagcggctaagttgggagagggagctaggtgtgactctgcagaccaggtcggtccaatgggggtcccagggtcccctctaagatggtacccaaaactcttccctgttggtcaccagcacctgggacctttcttttttctttctttctttttttaatagatggggtcttgccctgtcacccatgatggaatgcagcggtgcaatcatagctcactgcagcctcgaactcctgggctcaagcaatcctcttgcctcagcctcctgaatagctgagactacaggcgggagctaccatgctgggctaatgtttaaagttttttttagagatgagatctcgctatgttgtccaggctggtctggaaccgctgggctcaagtgatgctccacctcagcctcccaaagtgttgggattacaggcataagccaccacgctagtgtcacaagtacttcaaacatgtcttaggttagtatcatctccgcaatcagacccccaggaataatactgtttcccgccaggcacagtattacagtggctcatgcctgtaatcccagcgctttgggaggccgaggtgggcggatcacgaggtcaggagttcgagaccagcctggccaacatggtgaaaccccatctctattaaaagtataaaaaattagccgggtgtggtggcgtgcacctgtaatcccagctactcgggagactgaggcagaagaattgcttgaacccaggagacggaggttgcagtgagccaacattgtgccattgtgctccagcctgggcgacagagcaagactctgtctcgagagaaaaaaaaaaaaaaaaggtcgaggcaggagaatcgcttgaacccaggagatggaggttgcagtgagccgagatcccgccactgccctccagcctgggcaacagagtgagactccgtctcaaaaaaaaaaaaagaaccctccaatgaactttcctggagggaccccacccccaacccacagccagcctcccagcctacccagatctgcagcttgatcctcttgtcatggcggtagacggtcttgaccttgaaatcgatgcccacagtactgacgaaggcgggagtgaaggagtcgtccgcgtatcggaacaggaaggaagtcttgcccacactgctgttgcctatcagtagcagtttgaacatatagtcgaagttctgatctgctgcatcccgtgggcctgcctgggtgtctccagctgatgccatcttggcacaagcctcctgggacagggagacctgaaatcctcagggagaggagacgggcgtcctgcaggggaatcaaacatcaagaacagctcctgtgaatgcaccaggcctggattcaaatctcagctcggtcactcggagaccaagtgatgctggatgcatcgcttgccccctctagacctcagtgtcctcttctaaaaaatgggatgtttgtcacagtcccttcctgaaagagtagttggttgtgagcctaaaatgagtttctttctttctttttttttttttttagagacaagatctcgctctgttgcctgaggctggagcgcagtggcgtgatcatagctcactgcagtcttgacctcctgggctcgagtgatcctcctgcctcagcctcccaagtagctgggactacagacatgccaccacatcaggctaatttaaaaaaaatttttttgtagagatggggtctcattatgttgcccatgctggtttcaaactcctctgctcaagcaatcctcctgcctcagccttccaatgtgctaggattacaggcatgagccaccacgcccgacctaaaatgtgtttctttattcattcaacaaatgcttactctctgccgggccctgttctctgtggaaatgcagctgtgaataggacaagaaaaagtccatcctcgggtggtcacgttccttccagtgggaaggtattaacacacgtaacggtcattagacagtgcctggtatagagctggggcacaaaaaatgtgactgctgtttaatcttcacaccctgtggcgtaactgagtctgtattggggtggagggtggggagacctttcctatctggaaacccagaggcctagcaaagggttcaagtgcaaggccgagggtaaggggctctggcccctgcagaactagattctggagaaggcacaggtgtggacttcgccccagcgtgtgcagccggtgtggcccaggtgtaagctggggtggggtggggggaggacctgccagctggataagctggatagagcccctgattaaggcttgggtgttgactttggcaggtgtcagccactggggcgcctgccgcccaccaactcatgccaaatacaaccccttctctgagttccaaggggaaggggttttctatgtacagggcccaggtttagagtccagttctaccccctaaatgggtactgctattttctatttgtcaaaggggccaggcctgtctccttctgcccaaggctgactcactccagccccagtccacggaggcaggagtgagagtccttatacccaaggaaacgatcccagccacttaattaacacaaccccaccaccacgaccactgccgcccacccttggtctttccaggcaatctgtcccacggctaggctccttgaatctgcccacactccaacatgctgcttcatccgagtccaaggtgctccctcaaccctcataacctctcccaggcctcagtttccccagctgtctatggccgctgcgggaaccgcacggagaggctgcagaaggcctggatgcaggcggggcagaggcagagacagccctggcacagctatttctcaactgcctttggggcttttttccattttaaaccaggacccaaccggccccaccccgtgttccaggagaacgagtttaaggaggggaagagaagaggcaggaaacctttccccacgcagggcagggccgcaaggctggggcccccacctcccccagccttagctcacctgtgtcagtcggtcccgcctctttctaaccatctgccgaccctccctcaagcctggccccggagggctcgcctctgttccccttcactagatttggggcgccccagccaatgcaggtggactcaggagtttcccccatcaccatatggtcccaacgcctgtccccagctgggctctctgccccgcccgcgccccatcagcgcttcccaagtgcccagctgggtgggggcgagggcagaggcgttccccgcagccccgcctttgttccccagaccccctaccttcctcccaaacccccgtaccccacagacctgctcggatgcggaggggccgggtgggctgcgctccttcccaggggtgacctcgcgtagggggcgccgcctgcaggggttccgcctgtgaactcgctgcggcttggccctggccgcgaccccgaccccgcagccgcagaagccagcagcctgcagccacccggatcccgcgcgggctccgcccagaaggcggaggaagggccgttcccggagcgggggatgggggaggacgaagaggggccgagtcttgggcggggctttcagagagcgggtgggaggggctggaagctgcaccaagcgtctagagcccgtcctagccaagcaacatctcattttcccagctgcttgtaaagagcttctactatacgcacggctgttaaaagcatagagtcttgggcctggttcgagtcccagctccaccactttctagtcttgtggctttggacgcgttacttaacctctttgagcctcagtttccccatccgtcaagtagctcatagcgagagtacccaacctcacagagttgtgggaggattctgatctgagttagtgtttgtcaagtgcagtgccggccttaaagtaggctaggccaggcgcggtggcctgtaattacagcagtttgggaggccgaggcaggagaatcacttgaggccaggagtttgagaccagcttgggcatcgtaaggagacctcatctctactaaaaataacaaaaattagccaggtgtggtggcgtgcgtctgtaaccccagctacttgggaggctgaggcaggaggattgctggagacatcgaggctgcagtgagccttgattgcaccacagcactccagcctgggcaacagagcaagaccctgtttcaaataaataaaaataaacgagagctgggcgcggtggcttatgcctgtaatcccagtactttgggaggccaaggcaggcggatcacttgaggtcaggaatttaagaccagcctggccaacatggtgaaacctcatctctactaaaaaaaaaaaaaaaaaaatacaaatattaggggctgggcacggtggctcacacctgtaatctcagcactttgggaggccgaggtgggcagatcacctgaggtcgggagttcgagactagcctggccaacgtgaagaaaccctgtctctactaaaaaatacaaaattagccaggcgtggtgacgcatgcctgtaatcccagttactctggaagctgaggcaggagaattgcttgaacccggaaggcggaggttgcagtgagccgagatcacgccactgcactccagcctgggcaaaaagagcgaaactctgtctcaaataaataaataaatatacaaaaattagccgagcatggtggtgcacacctgtaatcccaactacttgggaggctgaggcaggagaatcgcttgaacccaggaggtggaggttgcagtgagccgagatcgcgccactgcactccagcctagacgatggagtgagactctgtctcaaaaaaaaaaaaaaaaaaattaaaaaataaatgaggctgggcacagtgtctgatgcctgtaatcccagccctttgggaggctgaggcaggaggattccttgagctcaggagttcaaggccagcctaggcaacatagagatcccaactctacaaaaaatttttttgaaaattagctggccacaaaaaaaaaaaaaaaaaaaaaaagaaaaagaaaaaaagaaaaaagaaaaaaaaattagctgaccatgggggcacatacatgtagtcttagctactccggaggctgaggcagggggattgcttgagcctgggagagagagaggcttcagtaggttatgactgtgccactgcactccagcctaggtgacagggcaagactttatctctaaataaagaaagttaaagtgggttggatccctttgtgaaatacccaggttttgctggtgttggaatcccagcaattccaccttactcaatttgctgaacttctctgagcccccactgcctcgtgggaacaaaagtagctgcctcaagagctgccacgtggatgaatgaggatgaagtgcattagttaggaagggctgggttatgcttagtaacaagcactcccaaagacttcacggccccaacagctaaggtttggttcccatgatggttgttttgtgaagtgaaaatgcagcaaattatgtactgttttgtaatacttctccttggaagggacacatgccacctctgctcacatttcattggccaaagcaagtcacatggccacccccaatgtcagtagggtgggaaatatgattgtcctctaggatcagaaccatctgggcctggtggctggcgcccgtagtccgagctactttggaggctgaggtgggaggattgcttgagtccaggagttggaggctgcaatgagctatcatcacgccacttcactccagcttgggtgacagagcaagaccctgtcaaaaacaagacaaaacaggctgggcgtggtggctcacgcctgtaatcccagcactttgggaggccgaagcgagcagatggcctcaggtcgggaattcaaggccagcctggccagcacagtgaaactccgtctctactaaaaataacaaaaattagatgggcgtggtggcaggtgtctgtaatcccagctactcaggaagctgaggcagaataatcgcttgaacccgggaggcggagattgcagtgagccaaggtcatgccattgcactccagcctgggcaacagagcaagactctgtctcaaaaaaaaaaaaaaaaaaaaagacaaaacagccaggcatggtggctcatgcctgtaatcctagcactttgagaggccaaggcgggtggatcacctgaggtcgggagttcaagaccagcctgaccaacatggagaaaccctgtctctagtaaaaatacaaaaaattagccaggcatggtggcggatgcctgtaatcccatctactcaggaggctgaggcaggagaatcgcttgaacccagaggcagaggttgtagggagctgagatcgcaccactgcactccagcctggacaacaagagtgaaactccgtctcaaaacagaacaaaacaaaacaaaacaaaacaaataatacatgatatgtcagtggttaacaacatgtctggtatacagcaggtgctcaataaatgggcatcattataggagaggcttacaggataaaatggctgacactccaaaccatcatgcttcatgaatggggaaactgaggctcttggctctacccttgcctgcccctccccctgcttctcatgggggaaaaaaaaaagacagcagccatttctgaagaagcatttattagcatgcagggcccatgctagaggctccttatttccagggcaaggccagcgagacagagcccattgctcaggacgcagcccagattgcaaagagaggacagcccatggtagcggaagaaattctggcggagagcactgtacttggggtccttctctcgcagctggcggtagggatcgggaccctggtggctgcctggtacctccccacccaggcctcgctccttctccacggtttgcagggcccacatggcagctgtggtgcggggttccagccagcgggcgttgacagtggccagcgtaaggctcaggaacagcaggtaaagctggcagggagagcagaggagaaggtgagccatgcctgggaggccagaggggccctagggagggtctttctgcatcctcaacagcacaggggtgggggtggggacagcactggatcaaaaaacctgcctccccctctttccttgaacccagactgagggacccaaagcagaactccagctcttctactctgaaactggcagctctgaaggaaaggctccatccccacctcctctatccccccgcaaaacctcccgagcctcttctcctctgatactcagactggaagtccccagagcaggatctctttcctcagtggccacagcccagacgcctgaagctgacattggacccacagagggtgaataaaaagtctttgagtggctgggcgcagtggctcatgcctatagtcccagcactttgggaggctgaggtgagtggatcacttgaggccaggagttcaaggacagcctgggcaacatgggcaaaaccccgtctctactaaaaatacaaaaattagccaggtgtgggggctgtccccctgtaatcccagctactcaggaggctgaggcatgaggattgcttgaacccgggaaggagaggttgcagtgagccaagattgcaccactgcactgcagcctgggcgacagagcaagaccctgtctcaaaaacaaacaaaacaaaacaaaaagtctttgaaggcaggcatggtggctcatgcctgtaatctgtaatcccggtgctttcagagatgggggtgggagcatcacttgaagccaggagttcaagaccagcctgaacaacacagcaaagaccctcatctttttttttttttttttttttgagactgagtttcactcttgttgcccaggctggagtgcaatggcgtgaccttggcccactgcaatctccgcctcctgggttcaagcaattctcctgcctcagcctcccaaatagctgggattacaggcgcacaccaccacacccagctaatttttgtatttttagtagagacggggtttcaccatgttagccaggatggtctcgcgctcctgacctcgtgatccacccacctcagcctcccaaagtgctgggattacaggcatgagccactgcgcccagcctattttttttaattaggaaaaatgtttttgccattctcacattgctataacaccatctctatctgttttaagtatttgaataccttctgagcctgtttcattaaaataaataaataaaaggaaaaaaaaacagtctgtgaagttctagttacccataatcccctcctgtctgtgagattattcttgaaacacctgtcaggtctcacttacccacgtctatgaaacataatgcaggcaagggaaggccagagtaaatagagaaatctgagatgcagagatagtttcttgccttgtggccagaaaaatgtgtggaaggggataggaaaccataaattcccagtcgggctggtttttaaacaataagctggggtcaatgtgccagctcagctgagtcaccacagcttggcagcaggcccagccagcgggaggagagggaacagcagctagcagggagatgctgggggatagacagggctgctggggactgttgtacaggctgtgcactgctcaagggtatccagagcccagctttgtatctaccaggaagaaggggctcccctcccctcccttcctcttccctcccctctcctttcctctcctctcctttcctttcctttttttttttttttttgagatggagtcttgctttgtcgccctggctggagtgcaatggcatgatctcggctcactgcaacctctgcctcctcggttcaagcaattctcctgcctcagcctcctgagtagctggaattacaggtgcacaccaccacgcctggctaatttttttgtatttttagtagagacggggtttcaccatgttggtcaggctggtcttgaactcctgacctcgtgatccgcccacctcggcctcccaaagtgttgggattacaggcgtgagccaccatgcctagcctttttttttccccccctggaaaaggtgtagccataggcgctgactgaggtcctgggaacaagtctccagagggcagtggcactcaaacccacgtacctggctggcctcccagaatgtgagctgagcccaagcatgctgtgaagccaagatgcagaggttgatgaaggcacagcccatggagatgtggaagtagaaggggaagagtttgctctgcactagtccgaaggtatgtcggggaaggcttcggaaaagcaggaagcctgcagggtatggggaccacaggggtgttagggcacttcccggttcccctcttatttccatccccaccccaggtacccatgacatccaagctgagggtccctacctgagacgaaggtcacccacatttgcatgccccaggcacctgacaagaccagtagatggaccatcttaatcaggcctcctaggttcccgccttcctccatcttgcagtcctgggaaggaggcaccgggtggctcagaactttacctttgcctcatgcgtggccttcagaccctgtgagcccgctcggggacagggttacggccaatccagcagagattctggcaaagcatcccgggaatgagagtgagaaaggcccaaagcagtcaaggcccaaagacaaccctcgaccccatctctccaaatgtcagccctcaagatctcaggctctctggacctcaatctccatgccacttcagaggccccaaatttcagccacagcagctccagatcatagccctaggtcttcagagatcactccactaattcccaaatatcaccccagggatccagttctgacagccaagaccactcctctcataaaataataccggatattaggtgaagatcccgaaagccccgaggaaaccctaaatctcatcctgaggacaccgatcccaccaaagccccgaggaaacgccaaatctcatcccgaggacaccgatcccaccgttaggaaccgggacctcaatccgcagcacccggattccgagaacagaggcgtcggggccaaatgggctgaatctggtacctcactcccacgcccccgggtggacagcgaccctcctcggccgcgtcccctcgtgggtttcccccaaccaataattcgtcccgcctcccagctgagcccgaagccaatcgggtcgtagatctgcacctttctatcccgccctcctgggtattgactaatcgtagaaacccccctgggatcccgccccctccacgggcttttatccaattacgccgcggctactaagcgcagctgaagcgtgaaggcgccaatgaggccttcggctactccggcaggggcggaactaaaatgccggccacacccctctctgtgactcagtctctgagcgttttaatacgatggtgtccccgcgggatcaaacttcagcgtcacagctgaggactggcttcgtggtccctgatgggagagcatgaacaggtggtatgtggtaggtggggttctggagcctggcgggtgtagatttcacaacccagggggcggagccaggatgatgaccccgccccctccctaaataattctcccgggagggacacggaagcagcaaccgggatgggacggggagagaggaggcactactggggacctaagctggttctcaaatgcctctccttttcccctccaagcctcccaggcttcctatggtccctaagtcccgggttctcagcgtgacattccagagcaaacacagctccccattactctataccaggcactggcatggattaatttatctaatcacaacatcccagtaaggtgactattatgacatctcgtttttatagttggggacactgaggcatggagaggttcagtaacgcgaccagtattacacagctggaagggacagagctaggatttgaacccaggccatctagctggagagtttccctgcttaaccgtcatactctgctgtccctggaagtgaggacctccctgaggcagtgactctcggaggggcagcttaggacatttcaggcagaagaaaaacgtgtacatcacagggtgggtgtgaagatccagtgaatgcttaggggatgcccggcactcaattaggtgctcagaaaataggagcctaaaaaaggattaaggaagattttactgaagatatgctgaatagtttttgtttgtctgtttgtgtttgagacggagtttcgctctcgttgcccgggctggagcacagtggcatgatatcggctcactgcaacctccgcctctgaggttcaagcgactctcctgcctcacccttccaagtagctgagattacaggcatgcgccaccacgcctggctaattttgtatttttagtagagatggggtttctccatgttggccaggctggtctcgaactcctgacctcaggtgatccacctgccttggcctcccaaagtgctaggattacaggtgttagccaccgtgcccagcctgagtagttctgaagagcgtgtaggagtcttccaggtcgactgaatcaggcagagggcctggcaagggtgacagagagaaaggtctagaggatttgggggaagaggctgagtgtgactcagggcaaggtgcctttcacctagaagtttctccaggcagacctgccccagatatctccatctgtgccatatgtggctatactggagggggaggggagttgaatgtgagacccagagctcagctgtttcctgtttccagcctcttctagcacgggtctgggccccaattcagctaacatttattgaacagatatgccctgcctctcctgctcacactctatggctggcattcacctgtggggccaggtcgaaactcctggcttggccgtcaatgccttactggagctgctctgctaacctcctgctgcttcctctcggacctcgattcagccatcatgaatttaccagcatagagcatgtgattccacacctccaagcttttgcacatgctgctccctgccaggaaaggccttcctttaagccaatgtcaaggtcccttttttctttggactcttctgaggcctgattttttttctttggggccttctgggtccttctcactgcccagcccaaaccttggggctgggataatcttttttgttgttgttttttatttttggagactgagtctcactctgttgctgaggctggagtgcagtggtgcaatctcggctcactgccacctccgcctcccgggttcaagtgattctcctgcctcagcctcccgagtagctgggattacaggcgcccaccaccatgcccagctagtttttgtatttttagtagagacggggtttcaccatattggccacgctggtctcgaactcctgacctcaagtgatcctcccgccttggcctcccaaagtgctaggattacaggcgtgagccaccattgctggccgcgtctggccttgggatcatcttttatccagctttggctcctaccataactgagaagccttgagtttagggctgaggcctctctggcatgtcagggagggtctgggggcactggggacatggggacttatctcaaagcagcccctgcttccctactcacagcgaccctcttttggccggcctaccccgggaccctgactactctgtgtcctgcctctactcacctccctcaccctccagcatgtgtttgcctgctaacatgaagtgtgacaagtactggggttagttagggggctcccatagggctggggacactgggaggggctgggaatgtgaggagtgccctgcactgtccctcaaggaagccctcacccctaggctcttcctcggacaaggctctggagcgtacagctcactggtccaggactccagagccagagaccttgggatgccctgcttctggggacacagtgaggactgcagactgcaggccagggtggggctcagggccttcgccacatgaggctgccccctcccccagtccagacctgcagaagcagtgctgtaatgaccaggacattttgaagaggcatcacaacgtagctaaggtcacccccacccgggaaaccccttcaatgcagaaaaccactgcaatctactgctgtggggcttagggaaggggctgtaaggcagagagactcccatgaatgcacccactgtgtttcttcagcacctagaacagcacctggcactcagcaggccctggctaagcaagtcttaaatgaatggatgaaggaatgaatggaaggaaagagtgtggttgtgtgtcttccatggggatttggctgtgatcgtctctcagccacataagtgcacttctgagcatatgtagcccaagggggaggtgcatgaatatgcctggagtgcagctttgcctgcacttacggtttgggacacctagaactgaggagatccaactcttgtccagccctcaaaactgggttgaggtgagcaaggaggcagctcagggacaaatttctactcccatctcatctctcttccttagaagcccttggagaccagctcttccaaagtcaaaggtgagaaatctcctttccaacaaaactgtgtggggaagacctgctggtttctacctctaccctctgccccagcatcagctgtccccctgccatggtcacccattcactcctgcccaaggctgagtgggcccctgttctatatcttatcccctgtccctactgctactctgagcctttgctgacctctgccctgcccttgccccagaccccaccccttacagccctggctcaccctcttctctgcccacagccaagaccattgtgatgattcccgactcccagaagctcctgcgatgtgaacttgagtcactcaagagccagttacaggcccagaccaaggtgaaccaccttggccctgcccccagcaacctctgtttctccttgccctcccctccttcctcccaccccaaggctgacctctttcccccaggctttcgagttcctgaaccactcagtgaccatgttggagaaggagagctgcttgcagcaaatcaagattcagcagcttgaaggtgaggactgaccagagatcaaggtcaggctaggccaggcgtggtggctcacgcctgtaatcccagcatttggggaggccaaagaggttggatcacttgaggtcaggagtttgagaccagcctggacaacatggtgaaaccccatatctacttaaaaaaaaaaaaaaaaaaagccaggtgctgtcactcatggctgtaatcccagcactttgggaggctgaggcaggtggatcacctgaggtcaggagttcgagaccagcctggccaatatggtgaaaccccatctctactaacaatacaaaaattagccaggcgtggtggtatgcacctgtagtcccagccactcaggaggctgagaaaggagaattgctttctgggaggcagaggttgcagtgagccgagatcacgccactgcactccagcctgggcaacaaagcaagacttcatctcaaaagaaaaaaagtcaggctggaagctggtcctgttgggatcagctgggccaggccagggtgagggaaattgggagagtctgggttctgggtcaagattaggacaagctgggttcagggtgggatcagggctcagtcaaggtcccacactctctgcagaggtgctgagccccacaggccgccagggagagaaggaggagcacaagtggggcatggagcagggccggcaggagctgtatggggccctgacccaaggccttcaggggctggagaagaccctgcgtgacagtgaggagatgcagcgggcccgcaccactcgctgcctgcagctgctggcccaggagatccgggacaggtcggggatggcgggagggcagcttggagtccacaggagggaagggagacccagaactggggaatggaggcaggatgggggaaatggcagatgcctgggggagggggactgagggatggtggaaagcctgagggacaagaagagggaatgaggccgggtgtggtggctcatgcctgtaatcccagcactttgggaagccgagatgggcggatcacctgaggtcaggagttcgagaccagcctggccaacatggtgaaaccccatctctactaaaaatacaagaattagtcaggcatggcggcgggtgcctgtaatcccagctactagggaagctgaagcaggagaatcactggaacccaggaggcagaggttgcagtgagctgagatcgcaccactgcactccagcctgggcgcctgggcgcctgggcggcagagcgagactctgtctaaaaaaaaaaaaatgaggaggggatgagaggctcaggggagacaggtggctggtgggggcgggggagtgggaaactgagaggccagaaggcagggaagacagaaagctggaggtgggatggaaaaggaggccaggggatcagaaagggggatggcagggaagactgagaggacaggagactgggggtatagaaagtcgggggacaggaggtggggaggtggaggccaggtgataggaggctgagtggggtgggagagactgagagaatgggaggctggggatcagaaggagaggagggggatgagggtagggggattgtagaaggggaggggaaaagggcagggaagtgtggggaggggacagagcttgcggggatgggtggaggcacagataggggcatgggaggtcaggggccaggcagggagtgcaggtctaggctgcactgtcccctcagcaagaagttcctgtgggaggagctggaactggtgcgggaggaggtgaccttcatctatcagaagctccgtgagttcctggagcccacagccggtgtgtggggagggggtccttcttcagcctttgtccgcctgagccccctccctccacagaagcgcaggaggatgagatctcagagaacttggtgaacattcagaaaatgcagaaaacgcaggtgaaatgccgcaaagtgagtggaggagatggggaccctggggaggagtgggagagggagggatggggattttggccagcctccaccatgagattggagcctgggttcaaatctcagctctgccactcactgctgtgtgactgtgggcaagtcacttgacctctctgagcctcagtttcctcatctgtataatggatgtaataataactcatcttggctgggcgcggtggctcacgcctgtaatcccagcactttgggaggctgaggtgggtggatcagaagttcgagaccagcctggccaacatgatgaaaccccgtctatactaaaaatacaaaaattagctgggtgtggtggcaggcacctgtaatcccagctactcaggagactgaggatggagaatggcttgaacctaggaggcagaggttacagcgagccgaaatcgtgccattgcactccaccctgggcgacaagagcaaaactcccatcttaaaaaaaaaaaagaaaaaagaaaaagaaaaagaaaactcatcctgttgggtgctgtggcatgcctgttatctcagcactttgggaggctgaggtggttggattgcttgaggccagaagttcaagaccagcctaggcaacatggcaaaaccctgtctctacaaaaaacaaaaaaaacaagagggtgtggtggcacatgcctgtagacttagctactcagaaggctgaggtagggggatcacttgagccttggaggttcagggtgcgttgagccctgatagtaccattgcactctagcctgggcgacagactgagaccctgtctcaaaaaagaaacaaacaccaaaaacaaaaacaaaaaacaaaacaaaaaaaaacactcctccctacctgatcaggtgtctgtattagctgagtactgtgcacttgaatgcagtctggcatataacaagtgctatataacagtcaccttttactattatcattattattatttattttgttttcttttttgagacggagtttccctcttgttgcccaggctggagtgcaatggcgcgatctcaactcactgcaacctctgcctcctgggttcaagcaattctcctgcctcagcctctcgagtagctgggacaacaggcgcccgccaccacgcccggctaactttttgtatttttagtagagatgcggtttcactgtgttagccaggatggtctcaatctcctgacctcgtgatctgcccgcctcggcctcccaaagtgctgggattacaggtgtgagccaccgcgcctggcactattgtcattattattatgactgctgttctctcatccctccccaccccagatcctgaccaagatgaagcagcagggtcatgagacagccgcctgtccggagactgaagagataccgcagggagccagtggctgctggaaggatgacctccagaaggaactgagtgatatatggtgatgcccagcctgcagtctgacccctgaccctcctctgaacccgttcccccaacgggatctggcagtgaccaccagaacctggagcccacctgagtccagacttccctcaccccctaggactcaccccaccacggcccccaaccttagctgtactgctgtctacaccctgagcagtgtggagtctcccagcgcccccagctccttgtcttcttgcaggtctgctgtgcacgtgctgcagaactccatagacagcctcactttgtgctcgggggcctgtcccaaggcctcgagcctaagaggtgagggaggctgagaattgctcaggggtgggaggtcattgtctagcttcacagggaggctatgttcagagagcctatttgggagtcacatctgatgggtgttattctatggtcacattaagtagtgttctggggtcacattaaggagtcactggaggtttcatccaggagtcattcatggtcacattcagagtcacttggatcttatatgagtccatggggactccacacagtggctcatgcctgtaatcctaatattttgggaggctgaggtgggaggattacttgagtctaggagtttgagaccagcctgggcaacacagtgagaccccatctctccaaaaaatttaaaaactagctgggtgatggtgcacctgtggctgagcacacctgtagtctcagctactcaggaggctgagacaggaggatcgcttgagcctgcgaggttgaggctgcagtgagccataatcgtgccactgcactccagtctgggcaacagagcgagaccccatctctaaaaaaaaaagtgtcaattgggtaaaatgcaagggtcattgaagtcataatttggtgtcacactggatcacattcaagggaattgggggtcatggtttaagtatcaatgaggtatactatgaagggacacagggcctatatttgggggttacttgagggtcacattcagggaacctgtccctcctgcaggccacaaggggcaccagtgcctgagccctccactcccctcctgggactctgactccgactgtgaccaggacctctcccagccacctttcagcaagagcggccgctccttcccacccggtgcagatcctccccagtccccccctccacccatttccctcctgacctgcccttgactcccacagtctagaccctcagaacaggcccagatcctgatctgggcatgcggtccctgacctgcagccccggagtcccctggacctggccaggccctgacccaccctctctctccacagcttgagcagccgggactgctctccctgaagacccctccagagagaaaataaactagcccagaccctcctctagccccgactgttagtcttgctgcttcctgtgcctaggaatccccctgccctcctagtttacccctcattgttgggggggaggggtgtagagaccccaggggtcattcgggatgtgtgggcttggaatcaggggacatctgaagccagatttaatatatgacaaggcaaggagtcattctgtccagacacgagcagccagacagacttccacactggccacagagccttcctttctggggggccctggcgaatggggaaactgaggcccagagagggagaggcgcggcccagggacatactctgaagcccctccctcctattaccctcggagccccgcccaccccagggtcctccctctctacttccattcttggttccttcctacaatcgatgctaacacgccccgcctccaagatcacggaggccccgccccacggggctatgcaaatgagacgcccggaggccccgcccctccctccacctcggagtctgcgcggcgcggccaggcccggccgaccgcgtctcggtcttcgcgtctgccagcctggctggcagtccgtctgtccatcccgccgcgccggggcagtctaggcggagcgggggctcaggcggcggcggcctcgacgcggtgagaggagggggtgggggcgcccctcatcccctcccgtgggcttcccacccccggtgtcggtctccggttcctgagggttgggtccctctgggtccagcgcggggaggggcgggggaggggaggcggcgagctgggggaggggaccgggctgggggaggggaccccgggccgaggagccagcaccggtggtgagggcggctgtgggtaactgtgattgtgtggttgtcattgtgtgtctgtgtgtggttgtgtaactgtcatcgtgtggctgcatgactgggattgtgtggtttcgggaggtccgcgggtgtgtgtgtgtgtgtgtcactgtcattgtgcggctgtcgttgtgggtgtcactctgatggtttgtgtgtgtgtgtctggctatgctgtgactgccattggccccccgtgtggctgctgtctctgtgtgtgactgtcttggtgttcgtgtggttgtgtgcataggactgtcattgtgtggctcctgttgtgtgttcattctgatggtgtgtatgtgtgtgtggctgtggtcgtgcgctgtgcacctttcttgtgtggcattgtgagtctgtgtcatggtccatggatgtggccatgtggttgtagatggcaccttgtctctcccctgtgactgttggtgtgaataagagactgttagtgtgtgtgtggctgtcgctgagtgccttgtaattgggggtgtgacgctgtgatgagttctgtgacccccattgtgtgcggtgactcttttctgtgactcttaagtgtgttgcaggcctgactgtgtgtccctgactgtagcggtgtgggggcttgtgtgggactgtgatgtgtgtagggtctcctgacatgtctctctctgtttggcctggggtgggggtggggacttgtttgatctgtttggtgtctctgacaggctatgagcccactgtgtgtgagtatgcagtgacatgtgttgtgtgtgttggacacctgtctgaacaagggggcccctcttgtttactgcaaagtggcgcccagcacagcgcctggaagtcggcaggtgctcggtcttcactgtgggatgggtgaacgctatgccatggttgtgtgtgtgtgtgtgtgtgtgtgtgtgtggtgccaggatggaggctgcggctgggttgtgcttcctaagggtgacagcatgggtgactctgggtatctaggacctctggcaaccatcaccccatatcacactgcagagtgagtgtcgtggttggggtgctggacccagagtgcctaccctcgcctgcctgggcctcagtttccacatctgcacaatgggggtgaccatccctgccctgctggctgccaggagcggctgtgagtcttcaggcgtggatgcagcctgggggaagccatagggcgctttcacaggtgagatggggctgggagaatggatgcaagcaggtgtgactgtgttgagccctaaagcgctggggactgggggtagccttgggggagggaagaggagaactgggaggcagaccggctgggaagagggggaaggagggagaggcagttggcagagaaggagggcttggctatcagcccaaccagacaccaacaccacagcccatggggacagagagaggggcccctgcagaggccatggaggaagcgactcaggggaagggtctggtagggatgggggccccttgggaaagaggatggtgtcccctaaaaactagtggggacccttctaagtgccatgggggaggggttcccatgaggctggggagtctcttctaaaggcccacctcctaaagggcattgggtcagagcctcccatgtaggctgtaaaggaagggacccccgtagactcttggggagtggtgtcagaggaggcaggtgtccccagtagggtcaggaccaacagggcaggacctggattgcagaggcatggccagaaggttcaagggacagagtcagggcctccccgggtcttcagggccaggggtgtggccaaaggactcaggggatgaagccagggtcccggtgacctgagccttcccctaggcacaccccctgggactcccactccctccccacctctgcaggcctggccttcaccatggcgggagggagaccgcatctgaagaggagtttctccatcatcccctgctttgtcttcgtggaggtgaggacccccgtacctctcccagagacggcgtgcctatctctgtctctgtccaacctcagtctccttatctgtacccacttttccatctctgggatctcccttgctgtcccctttctcttgagaaatggttatgagcttagattcagaagtgccactccccggggtccaatccctctctgccccatccacactgcagggtgctggacaccacaggtaccctcctgagccacagtttcctcattcataaaatggacatcaccagagtcccaactcatagggctgttctctgtgtgtgtgtgtgtgtgtgtgtgtgtgtgtgtacgtgtgtttgagatagggtctcactctgtcacccaggctggagtgcagtggcataatctcggtttactgccacctccacctcctgggctcaagcaattctcctacctcagcgtcccgagtagctgagactacaggtgtgtgccatcatgcccagctaatttttgtactttttggtagaggtgggatttcaacatgttggccaggatggtctggaactcctgacctcaagcaatcctcctgcctcagcctcccaaagtgctgggattacaggcgtgagccaccacgcccggcctcctagggctgttctaaaggtaaaatatattaattcatggacaaagcttggtacgaccccctgcccacagtgagggttacacctgtggtagctgctagcacccctacttctctgatttctttccatgtgggagagtctctccacctccccctgtctgtctgtctctcatttgagccttggccctaatctcactctccccatgcccatctcttctctccctctctctacaactcccttcccttttcctttcccttctctttcctcttgctttctcctcttctcccctcctttcctggctttcctctctctctgttttttttttttcacttcttccttttctttctttccctccctccctctctctctttctttcttttgtgatggagtcttgctccgctgcccaggctggagtgcagtggcacgatcttggctcactgcaaactccgcctcccgggttcaagtgattctcctgcctcagcctcccgagtagttgggagtacaggcgtctgccaccatacccagctaatttttgtatttttagtagagacagggttttgtcatgttgtccaggctggtctcaaactcctgatctcaggtaatccacctgcctcagcctcccaaagtgctgggattacaagcatgagccacgttttaattttttttctttctttttgtctttcagccattccttttcctttcttttttttctgagacagggtctccctctgtcacccaggctggagtgcagtggtgccatcatggctcactgcagccttaatcctctgggtgaagcaatcttccttcctcagcctcccaagtagctgggactatagttgtacagagataaggtcatgcgatctcaaactcctgagctcaagggatcctcttgcctatgcctcccaaagtgctggaattacaggcacgagccgctgcacacggcccctctgtttctgtctccttctccttctgtttctcctaagccctgacccttctctcacctcctttccccatttctctcagtctctctcccccttgtctctgtctctctccatcttctagtttctgtctctaacccatgtttctccatctctgtatctctgcctctgtggcctcagctggagtcctgacctctctcttctctctccgccacctctccccgccctggcttggtggcagtcggtgctgctgggcattgtgatcctgcttgcttaccgcctggagttcacggacaccttccctgtgcacacccagggattcttctgctatgacagtacctacgccaagccctacccagggcctgaggctgccagccgagtgcctcctgctcttgtctacgcactggtcactgccgggcccaccctcacggtgagacaatgaagacctcctaggaggcaggtgggccggtaagggtgggtgaggggatgggctggaaggccagaagactccatcttggtcttgcccacagatcctgctgggagagctggcgcgtgcctttttccctgcaccaccttcagccgtcccagtcatcggggagagcaccatcgtgtctggggcctgctgccgcttcagccccccagtgcggaggctggtccgcttcctgggtgagagacatggcctggggtcagccccatggtaatggtggggaggtgggtatagaagaaaagagtcatgggcctgacagtcataataattccaggctgggtgtggtggctcacgcctgtaatctcagcactgtgggaggccaagtgggcgatcacctgaggtcaggagttcaggaccagcctggccaacatggcgaaaccctgtctgtactaaaaacaaaaaattagctgggcgtgtggcaggtgcctgtaatccttgaacccgggaggcagaggttgcagtgagccaagattgtgccagcctgggcaacaagagcaaaactccgtctcaaaaaaaaaaaaaaaaagaagaattccagggaaaagctgggcatggtggtacatgcctgtagccccagctacttgggaggctgaggcagagactcagctacttgggattactagctacttgggagactgaacaagatcccacctctttaaaaaaaagggaattccaggggggaaggaagaggacctggaattgccatgatggggatgttaggaagcaacaagggacttaggctcagaccagatgtaatggaggttctagggacatgggtggggcctaacccaaccatgatggcaactgtcggaagagggtcccagaatgccataaggagagtctcaggcacaaaagagagacacaggcacaggacaaacaccctggggcccctgggtgagactctggctgtgctttaaatggggtcccagcctcaagtagtggctgtgggaaagggggaggggcagaccttacctataatgatggtcccagggcagagggcgggagacccagctctaacttattagtggccccaggaggagagtgttgaactcagtagtagccagtttaggggcaggcaggaagagccccaggtatgccattagggttttccctagccgtcctaggcatggggtggatcctgatgtaatggtgttggggcgggggtccaagcccagctataatggggctccaagggaggatccgcccctgacatagtggtaatcctagaaagacaggggccagataatgagggtccctgggggcaggaggcctcagagtaccttcatggtggtcttaaaggaagggggatgttggcacaactacagggtcccaagtgtgctttaatgacagtcacaggaaaagggagctaagaggcccaatggaatcagtgggagcatcagggcctggcgcatgaaccccttccactatcccacccctaggggtctactccttcggcctcttcaccacgaccatcttcgccaacgcggggcaggtggtgaccggcaatcccacgccacacttcctgtccgtgtgccgccccaactacacggccctgggctgcctgccaccttctccggatcggccaggtcccgaccgctttgtcactgaccagggtgcctgcgctggcagtcccagcctcgtggccgccgcgcgccgcgccttcccctgcaaggatgcggccctctgcgcctacgcggtcacctacacagcggtgagcttcgggagcttcggggtcggaaatgggtgtgcaggctggacagcgaccagcagctaggaagccgccagggttggagcctctgctcttccacgccccgggtgctgttggaagctctcgctccacgccccgacctgttggaagctctccctcctcctcccagatcctagccacgcccccagtcagaggctatcgctgtccattgactccgccccttgccctctggccacgcctcctgagccagtaatgcgagggaaactgttggctctaccctatggcatcaggacagtccctgatgtgcaagactcggaacccctatagcctagccaggcccccaggatgctacaggcgctagatattagctggcagactgggcagatgggacggccccctggagtccttgcccctcttctggagcccttgcccctctcctgggggccttgttccctcctgttgtagccctggccacgccccttgctcttaactgctctgggatttctaactctgtcccctgctttttcctggtcacatcccctgttgcttcaactcttttttctggcatccgggtttatgctcccaccctgtcagtggtcccctaggggtcaggggctccacctcctacagctcctacagctcctacagctcccttcgccctgactccaccctctggttctgtggccacgccctaatccagtaagtgtctgtccccatctgcgactccggaccagggacacctgggccccagaccttgtcctctgctcttgggagctctggccacacctagccctgcaggtggtgcccacgagactccaagacctcaatccctgacccccccccctttgcctttttggtcacgctccctggaaaagcccactgggagcccatgactccaaccctggagcccctggccactccctccagccccaacgctctggccatgcgctctagcccagaaaggagcgtccacttgggttcggcgacttgcctccgctatccccctgaccagtccggctccccgcagatgtacgtgactctcgtgttccgcgtgaagggctcccgcctggtcaaaccctcgctctgcctggccttgctgtgcccggccttcctggtgggcgtggtccgcgtggccgagtaccgaaaccactggtcggacgtgctggctggcttcctgacaggggcggccatcgccacctttttggtgagttgcctcctcaaccttcccagcatggaagaccctcaccagctctctgacccaagaggcaggaccacatgatggagaagggtgtggactctgtgtgaccttgggccaatcccttaacattacccttcctggatattctcatctgtgaaatgagataccaggatcagggtgaggcaaggccttgaatgcaaattttaagagggtgcccaacactcagtaatcaagattaatattttaacaaaacatttttaaaaatcaaagttaatacaaaactatcataatgtacagaatataaaaattctaaataaagatgaatcaaggctgggtgcggtggctcacgcctgtaatcccagcactttgggaagctgaggcaggcggatcacttgaggccaagagttcgagaccagcctggtcaacatggccaaaccctgtccctgctaaaaatacaaaaattagccaggcatagtagtcccagctacttgggaggctgaggcagaagaatcgcttgaacccgggggacggaggttgcagtgaactgagatcgtgccacctcactccagcctgggtgaaagagcgaaagtctgtctcaaaaaaaaaaaaaaaaaaaattagctgggaatggtggtgcacacctgtggtcccagctactcaggaggctgaggcaagagagttgcttgaatccaggaggtggagtttgcagtgagctgagattgcaccactgcactccagcctgggtgacagagtgagactgtctcaaaaaaataaaaaattaaaaaaattaaatcctgccactgtacaacttggtcttacttactttagcctagtgtggggtctgtgggataaataataattgcacctacctcagtaaaatggaaccaacagtgcctggcacatactatgcattagctgtttttgaaaaccggagcctcactttccttatctgaaaaatggggatggtatttacatggctcctatgtgacttgccccaggcctcaacactctcctctccctctattccaggtcacctgcgttgtgcataactttcagagccggccaccctctggccgaaggctctctccctgggaggacctgggccaagcccccaccatggatagccccctcgaaaagttaagtgtggcgcaggtaaggggggccgggggctgctcccggctggagagggtggtgggtggagggggccaaggagacaggaaggaagtcaggcaagaggtgggggtctcagaaccatggggaagtggagggatcacccatctctgtggacataggtcctgggcggacagccccaaagaatgaaagggagcacccccgtcttcttcccagggggacacggttaatcatgagaactgtggttgtcttttccatggggctcttcacctgatgagctccttgtggctgtggccggtagggcccagggggccactagccccttccgtctgtctctttgtctcaggaacccgaggtctgcaggccgcattcgacaccggcacggctcaccccatccagtgagtgttgggggagtggggggctaaacagggggacttccaggtgggcagccactgccccagaggtctcacctaggcctttatgctgcctcccgagttttctgatcccctgatatctggcttctgaccaccagagtcgcagaactgcgcccgccgtggccacctgatccccagctgtgtctcctccagggccccagccatgtgttcgtcgccccgtgtgccccgtcctcgattgaggtctgagccgacgcccttgcccctgcccctacccctgccagcgcccacccccagccagggcccctcgccttcctcccctggacctggggggccaggcgggggtggtggacgtggccggaagctgctgctgcccacgcccctgctgcgggacctgtacaccctgagtggactctatccctcccccttccaccgggacaacttcagcccttacctgtttgccagccgtgaccacctgctgtgaggcccgaccacccacccagaatctgcccagtccccacttcttccctgccacgcgtgtgtgtgcgtgtgccacgtgagtgccaaagtcccctgccccccaagccagccagacccagacattagaagatggctagaaggacatttaggagacatctgcctctctggccctctgagatatcccgatgggcacaaatggaaggtgcgcacttgcccctactattgcccttttaagggccaaagcttgaccccattggccattgcctggctaatgagaacccctggttctcagaattttaaccaaaaggagttggctccaaccaatgggagccttcccctcacttcttagaatcctcctgcaagagggcaactccagccagtgttcagcgactgaacagccaataggagcccttggtttccagaatttctagagtgggtgggcatgattccagtcaatgggggaccgcccgtgtctaagcatgtgcaaaggagaggagggagatgaggtcattgtttgtcattgagtcttctctcagaatcagcgagcccagctgtagggtggggggcaggctcccccatggcagggtccttggggtaccccttttcctctcagcccctccctgtgtgcggcctctccacctctcacccactctctcctaatcccctacttaagtagggcttgccccacttcagaggttttggggttcagggtgctgtgtctccccttgcctgtgcccaggtcatcccaaacccttctgttatttattagggctgtgggaagggtttttcttctttttcttggaacctgcccctgttcttcacactgccccccatgcctcagcctcatacagatgtgccatcatggggggcatgggtggagcagaggggctccctcaccccgggcaggcaaaggcagtgggtagaggaggcactgcccccctttcctgccccctcctcatctttaataaagacctggcttctcatctttaataaagacctgtttgtaacagaagtttggccatctgccttcctcccccgggtggtgggggggtgcggaggacattcatcgtgggtctagatgtctgtggagctgggtgtgggtgtgttgccgcagtgtatctaaggacaattgtggaaaggcagcccggtttcatggagcttcagacttgggctgaaatcctggctcagcattctgggctctgtggcctcagaaaagttcattcacctctctgtgcccttgtttcttcatctatcaaaggcaaacagtcactcaagctaccaaggcacacaaacccacatcaggagccgtacatgccctgtgtgtctcaggccagggcacagagggcacaaggaatggggtgaggatacttgggggtcctgagagggatgggggatgctgaggggcactaagaacctccaagtggaacacctggctgtgtggatgagaacaggggtgctgagtatgagattacaccaagacccaacccccctgagaactcagcagatactggggatgttcaaagggtcagggagagggagccacaggacccctccctcaattgtggctctgagggctttcagacagggcatttgggacccagagtcactcaggaaccaggaaaagggagtctgtttcccttctctccttaattaattcactcattcattaagcaaacactgtagaacccctactgtgtgctagatggtcttagtctgttccagctgccgtgacaaaataccatggacaggatggcttatttattaaattattaaaaaataaatttctctactactattaaattcctctactaattattaaaaaataaatttcttggctgggcatcgtggctcacgcctgtaatcccagcactttgggaggccgacaagggtggatcacgaggtcaggagattgagaccatcctggctcacagggtgaaacctcgtctctactaaaaatacaaaaaattagctgggtgtggtggcgggcgcctgtagtcccagctactcaggagactgaggcaggggaatggtatgaacccgggaggtggagcttgcagtgagccgagatcgtgccactgcactccagcctgggggacatagcaagactctgtctcaaaaaaaaaataataataataataacaataaatttctgatttatttatttatttattttgagacggagtctcgctctgttacctgggctggagtgcagtggtgcgacctcggctcaccgcaacctccaccttccaggttcaagcgattctcctgcctcactcagcctcctgagtagctgggactacaggtgcgcaccaccacgcccagctaattttttgtatttttagtagagacggggtttcaccgtgttagccaggatggtctcgatctcctgaccttgtgatctgcctgcctcagcctcccaaagtgctgggattacaggcatgagccactgcgcctgccttatttttattgtgtgtgtgtgtctttttttgttaagatggagttttgctctgtcgccaggctggagtgcaatggcacgatctcggctcactgcaacctctgcctcctgggttcaagcgattctcctgcctcagcctcccaagtagctgggattacaggcacccaccaccacgcccggcaaatttttgtattttcagtagagatggggtttcaccgtattggccagggtggtctcgaactcctgaccttgtgatctgcctgcctcagcctcccaaagtgctgggattataggcatgagccgctatacctggcctatttttttaatagagacagggttgtgccatgttcctcgggctggtcttgaactcctgggctcaagtggttcacccaccccagcctcccaaagtgctgggattacagacatgagctaccacccctggcctaacagaagtttattgctcacagttttgaaggctgggaagtccaagatcaaggccccagcagattcggtggccagtgagggcctgcttcctcatagactcactctagtctcacatggcagaaggtggagaagctctctggggcctcttttataagagcactaatcccattcatgaggactccacccttatgacctaatcacctttaaaaggcccccacctcctatcactgtgggttaggatttcaacatatgaaccgggggaaggggcacaaacattcagaccaaagcacaggtgctgtttagttaggcacagggtgggggttgtggcagggggaggttacagcagtaaacaacagacacaaacctctgctgtcacggatgtgagcgttctaatatgtaagacaacaaacaaggtaaatggggcctggtctccacacctgtaatcccaatactttgggaggccaaggccagaggattgcttgagcttaggagttggagaatgacctgggcaacatagtgagacccccgtctgttcaaatatatatatatatatatattttaaaattagctgggcatgttggtgcgtacctgtagtcccggctatgcaggaggctgagatgggagtcccttgagcccaggaagtcgagactgtcgtgagctgtgatgatgccactgcactgtagcctgggtgacagagcaagaccatgtctctggataaataaatacacaaattaataaatataaaaataaacgagctatatacagattcacaattccaaatttttatagaagtctgaaaaccaggccaggcgcagttgctcacacctgtaatcccagcattttgggatgctgaagtgggcggatcacctgaggtcgggaattcaagaccagcctggccaacatggtgaaaccctgtctctactaaaaatacaaaaattagctaggtgtggtgacacacgtctgtaatcccagctactagggaggctgaagcaggagaatcgcttgaacccgggagttagaggttgcagtgagctgagatcacaccaccgcactccagcctgggtgacagagtgagactctgtctcaaaaaagaaaaagaagtctgaaaaccaaaatcctttcataactcatttatggcaaaacctaacctgaactgacctgagattatatatagcttttatttatttcacttgatgtgaatattcttgtgttttgctgaagataaagtgacttgaggattttactcctggtcccaccaggggtatgaaatacatagtatttataccctattacttttttaaaatctgaaaaatcctgaatttccaactccaggatcatggatttagctaagggatctctgatatgttagatatcgatatgtgataaggagaacactcaagctaaggaagccgatgtgacaagtgtgggatagggacatggtttgcaatttttttaagagagagggagggtctcgctctgtttgttgcttaggctgagcgacgagtggaatgcagtggcatgatcatagctcactacagccttaaacttctgggatccagcgatccagtgatcctcccaagtagctgggactacaggcacacaccaccatgcctgctaattttttaaatttttagtaaagacaatgtcttactatattccccaggctggtcttcaacttcagggctcaagcgatcttcccacttcggcctcccaaaatgctgggattaaaggggtgagctgccatgcctgggctatggtttgcaatttttaaaaaagtgatcaaggaagttttctctgagatgacactgggagggagggagccatgcaaatatgtggtggggagacctctaggcaaagggaagagcaagtgcgaaagccttgaggtgggaacatgccttctgtgttcagggaacagcaaagtggcctgtgtagtagttggcacagggtgagcaaggaggagacagaagaaaaggaggctggggagacggtggggaagttgaggagatggtggagctgatcatgggccactggggggatgagatgagagcatcagatagctgatggcagaggaaagacagcatcatgaggccccctgattgactgaccaaggctcctgtttccagagcttatacacctgagacccgtggtctctcctgacacacagctgtctccactggggccaggaagaaagcaaagcttcagcacaacggacagcgccaccacccaaaccagcaggccctgtctgtgatgctgacgcagagcgctggccaacaatgggaatagtgggggaagaatcaggtcccattcaggagggtggtgacagcagccctggccttgcaccaacccccatactgggatagatgatcttagagaacacaggctggcttgtacctgtttgggattggctgggcgtggtggctcacgcctgtaatcccagcactttgggaggccgagccaggcggatcacttgaggtcaggggtttgagaccagcctggctaacatagtgaaacaccattactactaaaaatacaaaaaattagctgagcgtggtggtatgcgcctgtaatcccagctactcaggaggctgaggcaggagaatcgcttgaacccaggaggcagaggttgcagtgagcagagatcatgccattgcgctccagcttgggcaacaaaagcgaaactccagctcaaaaaaaaaaaaaaaaatgaaagccttctcagctgggcacaagtggctcattcctgtaatcccaacactatgggaggtctaggtaggaggattgcttgaacccaggagtttgagatcagcctaggcaatgtagcaagaccctgctctctaaaaagtaaagcgtttaggcctggagcagtggctcacgcctgtaatcccagcactcagagaggctgaggtggcagatcacctgaggtcaggagttcaagaccagattggccaacatagtgaaaccccatctctactacaattacaaaaattagccaggagtggcagcatgcgcctgtaatcccagctactcaggaggctgaggcaggaaaatcacttgaacccgggaggcggaggttgcagtgagtccagatcgcaccattgcactccagcctgggtgacagtgcgagactcggtctcaaaaaataaaaaaacgacaacaacgacaacaaaaatcaaaagccttctcaacatgcccctgtgggtctcacagcatctcaatctcaagttgactaaaacagagctctctgatttagaatgtcacaacacaactatcccaggcacagagctctctcctgtctcctcatgactcgagtaaaagccaactttctcccaatgcctcagggcccttgcactgaatgaattctccacctagaatgttcttcccctgcatatttgcacagttcacaccctgacctctctcaggccttttctcaaatgtcgccttcccagcctgacccaaccaccctattcaaaattgaaaaaacaactggcccttccttctaacttcccttccttgtgcaaatttcttttctttttttttcttttgagatggagtcttgctctgtcacccaggctggaatgcaatggtgcgatctcagctcactgcaacctccacctcctgggttcaagtgattctcctgcctcagcctcctgagtagctgtgattacaggcgccccaccccgcccagctaatttgtgtatttttagtagagatggggtttcaccatgttggtcaggctggcctcaaactcccgacatcaggtgatccgcccgcctcagcctcccaaagtgcttggattacaggggtgagtcgccgtgcccggtcccttgtgcaaatgtctttttgcctatgcttgtcatgtgctcacagtgtttcaattcctcgtgatgctcagtgggtctttataggtctccctcactcggatgtcgctccaccaggacagagatttgatctgttgtctgttcactgtggggtctacagttactagaatgggccctgatacatagtagatactattgcttgaggatgccagtaaactaaggataggcacagagtgaccccaagccacctagttcctaccctgtagccccaggtccaaccctacctgcaggcaggtacattcctccatgattctcctctatggtaaatcttcttctgtcaagatgtgaagacaggccagacacagtggctcatgcctataatcctggcactctgggaggccaagacaggcggatcatctgaggtcaggagtttgagaccagcctcgccaacatggtgaaaccccatctctactgaaagaaatacaaaagaaaaaaaaataagctgggcatagtggtgtgtacctgtaatccaagctacccggaaggctgaggcaggagaattgccggaacccgggaggtagaggctgcagtgagccgagatcgcgccactgcactccaacctgggtgacagagcgagactccgtctcgaaaaaacaaaacaacacaacaacaataacaacaaaaacagataatcagttaaagagtgaaatgtgtgcaattttgggcaggcagtcaggggaagcctctctgagtagatgatattttgaccaaagacctaaaaagagtggagggaaaaaaaagtcggctggactcggtggctcacacctgtaatcccagcactttgggaggccaaggcgggcagatcacctgaggtcagaagtttgagaccagtctgaccaacacggagaaaccccgtctgtaccaaaaatacaaaatcagccgggcgtggtggtacatgcctgtaatcccagctacttgggaggctgaggcaggaaaatcacttgaacctgggagacggaggttgtgatgagccaagattgcaccattgcactccagcctgggcaacaagagcaaaactccatctcaaaaaaaaaaaaaaaaaaaaaagccagaaggatatctggaagctgactgctgcacacacaagaacatcaagtgcaaaggacttgtggtgaggctgtattcagcatgctcccatgtatgtaactgtgctggactctgtgatgtgggtgtcactactgagtatttgtgcatttttgtttgtttttgttgagatagggtctcgctatgttgcccaggctggagtgcagtggcacaatcactgctcactgcagctttgacttccttgggctcaagcaatcctcctgcctcagactcccaaggagctgggactacaggtgcacgccaccacacctggctaaatttttttttttttttttgagacagagtctcgctctgtcgcccaggctggagtgcagtggcgcgatctcggctcactgcaagctccatctcccgggttcacgccattcttctgcctcagcctcccaagcagctgagactacaggcgcctgccaccatgcctggctaatttttttttctatttttagtagaggctgggtttcaccgtgttagccaggatggtcttgatctcctgaccttgtgatctgcccacctcggcctcccaaagtgctgggattacaggcgtgagccaccgcgcccggccaacacctggctaattttgaagtattttgtagagatgggggtctccctacattgcccaggctggtcttgaactcttggcctcaggcaatcctcttgccttggcctcccaaagcactgggactacagacataagccaccacacctggcctgtatgtgcatttggagtgttgaaatgtgaggtgaatcatgcgttgtatatctgctgggggatgggggctgaggtggcgtgtttgacagcgcagtgtatcggtgtgcttcactgtgtgtgtctgtgtgtgtagtggcaatgtcatagttgcgtgttttgcaagagaaagggtgtgggggatgaatgtgggacagagtttgtatgggatgctttgtgtcaggatagggcaaggttggagcatgtggatgatggggattctgaaagtagaatatattcagagatgccatggtgtgtgtgtgtgtgtgtgtgtgtgtgtagaggggtgtgagtgagcccagctgtgtgagtgggtgtgttgggggatgtcgtggagctgttttctggtcccagagggagagagaaagcccaggaaatctcactttctccctgcccctgggtctccaggcaacggcaccactttggagttaccaggagacaaggttgccagggcaacacaggcgtgagtggcagctctggggcgaagtctgggtgagaagatccagccagggatcacgatcattcactttgttcctccctttctccctgtttctcatcaatcccacctcccttccttcattgtcttaacgagcacgtatttgagaacctacaaatgtgctaggtgctattctcggtactggagaacagaagtgaacaagacaatgtccctgctgtatctctccttcagtcttccagctcctgtctctttatctctcctgcttccttctttgtcctgcggtcctgccttccccccgtaccacaaaggcggccccacagaaccccttagccagtgaggaagtaagttgagaggcttcatctcacagactttcggggatggccgttgatgttttgtccacgagcctgtgtccccagacacacactccggcccatactcaggtgcacagaaagacaagcacacagctcatccccctctccaaaactctcagttgtcattggatgacatcagcaaaaccacacacaaatacatgccgatcacaatactcctctgagatatcataagccccattttacagcagggcaaactgaggctaggagcctttaaataatatgtcactcattctggtctactcctccaactttcaacccttatatttgtctgattagctgacaataatagtattcgtgctggttcccccagcagcctccctcagggaagggtcttatttccctcgaatgcacccattcctccgcataggttctaaccatttgcccattcacctgaggaatcgagttttgatggacagattcctagaccaatagagaaactaagtgaactgtaccgatgcggccacggcttgggcgggactaaggctgggaacgagccaccgattggtcagagctacgcggcgaatggcggagacgctgaggcgggtgctaaccaggggcggtgcggcctggtccggggaggagaacatgcctgccgccggaccgcctttgctgctgctcggtacaccaggatctggaaaaacagcgctgctatttgctgcggccctagaggcggcgggggagggccaaggcccagtcctcttcctgacacgaaggcctcttcaaagcatgccccgcgggaccggaacgactctagacccaatgcgactccaggtaaccgtgggggtgggagcagaggcgttctagccaatggtggagtagatccgggatattgagtaacaggtagacaagccaatggagaggacggtggaagagcgagccagggcagccacgatggggcggagtcaggcaggcggagtgaggagtggcaccacgcggagcttagttaagattgaagtgagagcccatccaatgatgggcggtgttagcaagaggcggtgcccagagattgaagtccggcccatcaaggggcggggctaagcttgggtccattctggacctgagttggttcctgttagtgtcaaggatggggtcagaccgagaatgctgggggagggttttccgtggaaaaattgcgctagagatttggccaaaaacaaacaagcaaaaatggcttgccctcaactaatactcggcagtgatgagtgctggaaaaacgggcgaatataagaatatttaacagctctgaactggttcatcctggaaccaaggaaagtatgcaaggaggcagggttacttttaaggagtctggcttcctgtgctgaatccggccctttccttctgtttctccttctagaagatccgcttccagtacccaccctcaacccgagagcttttccggctcctgtgctctgcccatgaggccccggggccagccccctcccttctgctgctcgacggcctagaagagtacctagcggaagacccagagccccaggaagccgcctacctcattgccttacttctagacacagctgcccacttcagccaccggcttgggcctggccgggattgtgggctcatggtggccctccagacccaggaggaagcaggtagtggggacgtcctgcacctggcactgctccagcggtattttcctgcccagtgctggctgcagccagatgcaccaggtccaggagagcacggcctccgagcctgcctggagccaggcgggctgggccccagaacagagtggtgggtgactttccgatcagatggagaaatgatgatcgctccgtggcccacccaggctggtgaccccagctcaggcaagggttcaagctctggaggccagccctgagctttggtgggtgactacctctctgtgcttcagtttcccatggctggaatacttacctcagggacatatgcagatccaaagacctaaacaatgtaaagtgctttttctcttttaaaagtatagcattatcttgtatatattttacccaatcaatatgttgtttatagtttcattgctttaaactttataaaaagagcttcaggccaggcgtggtggctcacgcctgtaatcccagcactttgggaggctgaggcggtcagatcaccagaggtcaggagttggagaccagcctgcccaacatgatgaaaccctgtatcaactaaaagtacaaaaaaaattagctgggtgtggtggcaggtgcctgtagtctcagctactcaggaggcttaggcaggagaattgcttgaacccaggaagcggaggttgcagtgagccgagattgtgccactacactccagcctgggtgacaaagcgagactccatctcaaaaaaaaaaaaaaaaaaaagtttgagacttccttctttttgcactcaacgttgttactaagattcatctacatttttttagttcattcctttttccatattgcatataattccatgggtgactataccctgatttcttcatcagattgccttatttactgctgcgaacattcttgcacacatgccctggtacgtgtgtgtgtttttaggggccgagacaggtggatcacctgaggtcaggagttcgaggtcagcccggcctacatggtgaaaccccgtctctactaaaaatacaaaatttagccaggcatggtggcatgcacttgtactcccagctacttgggaggctgagacaggagaattgcttgaacccgggaggcagaggttgcagtgagctgagatcgagccactgcactccagcctgggtgatgaagacgagactctgtctcaaaaaaaaaaaaaaaaaaaatcagtcaggcttggtggtgcacgccagtagtcccagctactcgaaaagctgaggcaggaggatcgcctgagcccaggaggtcgaggctgcagcgaaccatgtttgagctactgggctccagcctgtgcaaaagtgagaccctgtctcagaaaaaaaaagaagtagttaaagcaaaactcccactgagttacttgttgacaccaagtgtcatcagagtactttcttagaacatggcctgattcagaattacttttattattattagtggcagagactagctagtggcccttaaacagctttgcccttcctgggtgtacagctaaactaagtttcctggcctttcatgtgactggggtcatgtgactgtttccagccagtgaggtgtgagaagaagagaggaagcccatttccaggccagatccctcaaatggcccattgagggtcattgctgccctttttcttcccttgctgactggcagtttgtagaacaggggatccatctaagtaccctaagagaaggtagagctacagactggaagagtctgaacctctgactcatcccatggatggctgcccatttgagctgagttaggagagagaaatcatttaatgtggtaagccagtaagatttaagagctgtttaacatactattttgttatgttatgagtagcattcagattgcagatccagcttctgaataagctcaagaactttaacttctatccctatggcctatgcccaggggaagatgggacttaaagggtgtttgtagaaatcatggtagaaaaacttacatacatatgtgtatatatatatatagatacaaaaaaaaactatacatatttaaaaatactgcaaggttgtggtttcctgagcaggatggattgggcagacaaaatcagcaatgcccctgctcctgagagaggcctcgccatccctgttccataagtcttgagtctgcactggttctctgagtcatattggatccctgatcatctgcagcctggtgtcctaagagcaagccacatagctggggggcagaggctcagcggctgggataaggctgttctcataagggttggagtaggggccatcggataagcccccttgggctccctgggagtcccctgagctgtagtcagttgagatgccagagtcagataccacaaggtacaggtactttaggtggggtggggtagggggcagctcagggcacagtgtccatggacgcaagagctgggagctggggtccaggatagtgtactcaaagctggcagcagaggctccctctgggctgggcttcgaggccaaagcagatgagcaggaggatgcttctgagccttcatccatggccactatgtccacactgccaccaggccctgggaggtcctcactgggcgggttccggggcagcaaccatttgtccagcaccagataggtatcctgggcatgctcactgcccactggctccagcagggggccctcatcatctgtccccggctccactgcctgcatcgtcccccagcagcgctctgagaggacttccagggaagcaggtgggtcctccgtgaagggggtgcaggggctccaccacaggcagccatcattctggtacagccacagctgaagaaatagcaccaacctgctcagagaggcctgcagtttggctgcaagaagcagggaagcccaggcactgaggggacaaccaggccacctacctggaagttacccttgtgggtggtgaagaggccttcaaactcgctctctgggctcgggatgccaggccagatcttctgcttcagagccctgttgaagccaatataaatagttacatagatatgactcattgaatactcaccaattccccctccactcccagtcatagaggcacagatacacttggtccctgtgatcacaatggaggcagaggagtacatcagggccaggggacaggggttttggctgaagcatcagcaaggccctacaaaagggtaaatggaacagggtattgaagggtgcataggagttcaatataccttggtcattctccctttaatcctggccatggccaggtgcagtggtttacaccagcactataatcccagtactttgggaggctgaggtgggaggatcatttgaacccaggagttcaagaccagcctaggaaacatagtgagacccccatctctaaaaaaaataaaataaaataaattaaaaaacccaaaaccctggcccagatttttccaggaggtccatgatgtcacttcatagataaatattatgttaccttctggggtaatgagagaaggcatttaggataaaatccaagccaggcacggtggctcatgcctataatcccagcactttgagaggctgatgtgagcagatcacctgaggtcaggagtttgagaccagcctggccaacatggtggaaccccgtctctactaaaactacaaaattagccgggcatgcacgcctgtaatctcagctactcaggcggttgaggcaggagaatcacttgaacctgggaggcagagattgcagtgagccaagactgctgcactgcactacagcttgggcgacaagagtgactctgtctcaaaaaaaaaaaaaattccaaactcctccccaccaccctgcagaaggccctgcgttatatgacccctgtcacctccctcatctcaatatctgccacacccccttacataccactctagccatgtggcaattttttttttttttttgagacggagtttcactcttattgcccaggctggaatgcgatggcacgatctcggctcacccgcaacctccacctcccaggttcaagtgattctcctgcctcagcctcccgagtagcggggattacaggcatgtgccaccacgcttggctagttttgtatttttagtagaggtggggtttctccatgttggtcaggctggtcgcgaactcccaacctcaggtgatctgcctgcctcggcatcccaaagtgctgggattacaggcgtgagccaccatgccaggccatgccatgtggcaattcttgaagctggctgaacgttccaatctcattcccacctcagggcctttgcacttgctgtttcttctccccacttttcaagcggctgcttccttccaatcttcaggtttccactctgatgtcacctcctcctggaggccttccctgaccatcctgtcatgtcaccacattctgtttgtttctgtgatatcactcattacaatttgtcatcaaatatttcttgggtcccttgtttgttgacttgagatccacaaggtcagggacttgtggtcagggtctagcttgttctccattctctctccagtgcctggcacatgtttggcactctgtttgtattttccaaccaagtaaatgaacagggccatgaaagacgactagaagattgcttagcagacaaggcaggaagggcattccaggcagagggaacagcatgggcaaaagcttgggggtgtgaaaccacctagtgtgtgcttggaattacaaatacctcagaacggctagtctgatcatagtgtctgagaagcttgaccgcaggggtgcggaggcattcagggtcttaaattctttcactaaatccatctagttgattttacaaaggtgatgacactggggaaaggaactaacaaagggacccaagaaatggcagcccctgatgtagaaggaaaatcaggtgaaagtccccaagagcagaaaatgttaacgaagagtctgggtctagtctggcatgcatcccagccctgccactgatgtgaatccttactgcgtgaccttgggcaagtgcgtgtctctctctgagcctaggtttccatagtgaaagaggaccgttggcggggaggagtctgggcccagcgcccaaatggggagctcaccggcggtgggagagcagcgcgagcacggtcagcagcaccaggatgaccacgaggatgagggagagcgtcaggatgagggggtccaggtctaagaggcggggaggaggtcagggcggtgggcttgccccgtgattcgccctggctcctcctacacccccgcctggggcctcaccgctaggcgtcagcagcgacacaggctccgaccaggcgctccagaagccgccgaagctcggctcagccatacgcgcgcggacggcgaaggtgtagcgcgtccggccccgcaggttgctcagcacacactcggtgcggccctccaggatctccacctgggggcggaatcagggcgagggacgcgtagcagacaaaaatagatgacgtgggggcgggccctggtggaactgagccaatcaggggaaaggaaaacggtgccctagaattgcaatgggaccaataagagtagggggaggagcccaagaaagctcagggccaatcagagagagagtctctggtacgaaagggcgggacccgggcaatttaatatctgggctagcactcgtagagggacccgggcgctaaaggggtctagggttacgggccggagggagaagaagttggggttcaacaggcttgcgaggacattaggaaagggggtgtgtctgtgggcgtggaacggtcttcagcaccagggtaatgggatgtgggatgttacggaccggccctgaaagcggcaccgggcgcgacctcgagaggcgtggctgggccgtagtcagtggagctttgggggctgggccgtaggggctggcctcaccctctgtacgctccctgcgccgttgccggccgagacgtccacctcgtagcggatgtgagacgtcatgggtgtctcaggcggcgggagccagcgcaacactacgtggccgctctcgtcagccaaccgcgccaccagccccacgggggcgtctaggagcactgcaggcatgggggttggtcaggtgggcgaggactgagaccctctcctccgaccactcctccattcccagagcacttacctacttcattgatgtggatgacacggtgatatcgcggagcgccggaggctgctgtgacgcgcaactctaggggcacgaagctcgacgtgtcggctgtaggcagcgaacaccagaagcgcaccgcaccacgagccgtgggagcctggtgcaggcgacacagcttccatggctcatccctatgcgcccagggaagggagcaggttgggaggggggaccggggagttggcattgcccggcctgtggggggcagtgtgtatgtgtgacacaaggtctagccttgtgtgtgtgtgtgacaaggtgttccttcgtcgcccaggctggagtgcagtggcgcgatcatggctcactgcagcctcaaattctggggcttaagggatcctcccacctcagcttcccaagtagttgagaccacaggcacgcgccacgcctggctttttttttttttttttttgagacggagtttcgctcttgttgcccaggctggagtgcaatggcgctacctcggctcaccgcaacctccgcctcccgggttcaagcgattctcctgcctcagcctcccgagtagctgggatcacaggcatgcgccaccacgcccggctaattttgtatttttagtagagatagagtttctccatgttggccaggctggtctcaaactcccgacctcaggtgatccgcccgcctcagcctcccaaagtgctgggattacaggcgtgagccaccgcgcccagtctaatttttttttaagagacggggatctcgctgtgttgcccaggctggtcttgaactcctgggctcaagcggttcttccgcctcgaccttccaaagagttgggattacaggcatgagccactgctggcctccttttggatactacctcgagaaggcgtcccagccccgacgtagtaacgccttaccctcgatttggaggcgttgttatcccagcctgatgtttggggtcgcgttccagcggtgatcgcgggagtgttcgcgccccggcccatagagggcgtgccagccctggacccgcaggtttccctccagtgaccacgactggaggcgccgtcgggcctcaaacagcaggggacatacgaggctacgacctccagggagctctgccccaccccctccctccgcccttggaggcacccgccggatcggactcactcgagctggtaggagaagctgtagttgcccgggcccaccccagcgctcgccgcttcctcccagaaacacaccaagtcctccaaccgctcggtgaagcacagaagctcttcgggcccccgggccgccagcaaggccgctggggaggggcgacaaaggaagggcatgggggtctgagctctatcctcgggagacagccccctcctcttccctcccgcagcctgggcggacccgataagaaaaaagccccgccctgccatcttcccaagcgggtcccttggaggggtccgcagaggtggtgcccccctaattcccaggggcaagtttctcgccttactgtcccccgccgtcaccactggcgcacacctgcccacccagcggccagctgagctgggcgcggcgttcaagacctcgagctcgggactgccagccccgccccagcctaggacacgcgcgcggctgggggtgtgtgcggagaggcgggccccctatcggccccggcaggctccccgccaaccgatagcgccaaccgtgccccccgcctccctccctccaccgggccgggcaagtgatctggcgccctcacacaaaccgtgtttacagtagcctgtggcttggcccctctaactcggacccgggctttaccctccctcccctagggagggtcggcttggtccccaccccccagggaccttagcaccaagtcagcccccttaggatttagcatgtcccagactccctgaaaaggtaaaacgggaatgttaagcccactctagctcttgcccgggacgcgatcaggagtcttggatcctaacataccccaccccgccccccacccatccaggacccagtctaagggttcagatgccagcttggcccccaggacccggtcaggaagtccagaaacaggcatggcccccaggacctaggctgggagttcaggccccagcatggtcctgcaggctccagcgtaggggtccacacgcagctcatccttacctttgctctcgaacttggggtccgggaggttaggcgggggcgcccaggcggccccagcgagcaggagacaaagggagccgacctggggccagagggacgccccgaggtggtccatgatacagcccccgccacggggagcccagggctcctgcccctccgtcccccgcccccggcacagtccacagctgggtcagcagctgcctccgccggacgcagctgaccaggcccttcccgaccaggcgcctctaagtggcagatccccgagggggcggggccagcactcagcctgggtagagataagtgcctggcgggaggaggcaggggcccttcccgagcccagaggccgcttgggggcaggggagggagttgggccgcaacagctcccgttctggcttcagacacacgttttttttttctttgtggccctggacaggtgacttaccttacctgagcttcagacttctcatctgtaaaatctagcctggcacatagcgaacattccaaaaaatgtacctactgattttatcgcagaaatcagcatctcttcccagcctggaaataaataaaaattattttctctctctctctctctctctctctctctctctctcctttccttccttccttccttccttccttccttccttccttccttccttccttccctccttccctccttccccctctctctctctgtctcagggtgttgctctgtcacccaggctggagtgcagtggcacaatcatagctcactgcagcctctggactgaagcaatcttcccactgcacctggctaatttttaaaattctttgtagagatgggatcccactatgttgtccaggctggtcttgaaatcccggacttaagcaatcctccagcctccatctcccaatgtgctgggaataccagcacgagccactgaagccggccaataataatccttgcaacgaccagcagttgagtgtttgcacagtgctaggccatgctcctgggcagtatgcataatatgtgagattttcatttacgaatttttgggaaaaaaatttttaccacccacatttttattctcttgggctgggcccggtggctcacgcctataatcccagcactttgggaggccgacgtgggcaaatcacttgaggtcaggagtttgagaccagcctggccaacatggtgaaatcccatctctactaaaaatacaaaaattagccaggtgtggtggcgtgtgcctgtaatcccagctactcaggaggctgaggcatgagaactgcttcagtctgggagatgaagattgcagtgagccaagatcatgccactgcaactccagcctgggcaacagagtgagactgcatctcaaaaaataataataattggctgggcgcggtggctcatacctgtaatcccaacactttgggaggccgagacaggcggatcatgaggtcaggagttcgagaccagcctgggcaacatggcgaaaccacgtctctactaaaaatacaaaaattagccaggcgtaggccgggcgcggtggctcacgcctgtaatcccagcactttgggaggccgaggtgggcagatcacgaggtcaagagatcaagaccatcctggccaacatggtaaaaccccatctctaccaaaaatacaaaaattagatgggcgtggtgctgcatgcctgtaatcccagctacttgggaggctgcaggagaatcgcttgaacccaggagccggaggtttcagtgagccgatattgtgccactgcactccagcctggtgacagagcgggactccgtctcaaaaaatatatatatatattcgagcgtggtggtgggtgcctgtaatcccagctactcaggaggctgaggcaggagaattgcttgaaaccagaaggcagaggttgcagtgagctgagatcacaccattgcactccaggctgtgcaacaagattgaaactctgtttcaaaaaaataaataaatagtccatgcacagtggctcatgcctgtaatcccagcactttgggaggccgaggtgggtggatcacaaggtcaggagatcgagaccatcctggctaacacagtgaaaccctgtctttactaaaaatagaaaaaattagccgggcgtggtggcgggtgcctgtagtcccagctactcgggaggctgaggcaggagaatggtgtgaacccagtgggtggagcttgcagtgagccaagattgtgccactgcactccagcctgggcaacagagcgagactccgtctcaaaaaaataaataaataaaataaataaataaatataaataaatataaataaaataaaatggcaatactcctaccctgtttctattaagcaggtgggttttttgtttttgtttgtagccaatgtgcttattgtcacctgacatgtatttgatgttttgttattgattcgctgcccttactattccatgaaagcaggtttttttttttttttttagatggtgtcttgctctgttgcccatgttggagtgcaatggcacaatcttggctcactgcagccttcgcctcctggattcaagcgattctccttcctcagactccagggtagttgggactacaggtgtgtgccaccacacccagctaatttttgtagttttagttgaaacggggttttgctgtgttggccaggcttgtcttgagctcctgacctcaagtgatccccccgcctcagcctcccaaagtgctgggattactggcatgagtcactgagcccggccagggattgattgattgattgattgattgatttgtggagtcttgctcttgttgcccaggctgcagtacaatggcatgatcttggtttactgcaacctccgcctcctgggttcaagtgattctcctgcctctgcctcccgggtagctgggattacaggcacccgccaccatgcccggctatttttttgtatttttagtagagacggggtttcgccatgttggccaggctggtctcgaactcctgactttgtgacccgcccgccttggcctcccaaagtgctgggattacaggcatgagccaccgcgcccagcctcaggcagggatttttttttacccttttgttctttgctgtatccctagcatatagaacagggcctggagcacagtagaagctcaagaaatattttgtggagtaaaagattagagatgtagagaaaatcaagctgagagaggtagagaaacagctgatctcgtgttagccactgggtacaactgtgcctgcgtaaccctgcgcttttaaaaaacggaagtcaacgcaaatctcttcctcaggaaattgatatttagactgtgcatgtatgtgagagggaggtggaacaaacaagatggacacctgtttcaaaatttggtcacaataaattgttatgaatggcaaacgggccccagagttaaatgcatgttttctggagttggatcaatatttgaacagcacccacttaccatgggaccttgagtaagttacttaaccctcccttgcctgaagcctggctgacatggtgagaccttgtctctataaaacacgttttttttttgttgttgttttttgttttttgtttttttaagtaagccagatgaggtggcacccgtctgtggtcctagctactcgggaggctgaggtgggaggatcacttaagcccagaaggtggaggctgcagtgaaccatgttcatgccgctgcattccagcctgggtgacagagtgagatcccgtctctacaaaacattgtttgtttgtttgagagacggagtctttttctgtcgcctaagctggagtgcaatggcgccatctcggctcactgcaacctctgtttcccgggttcaagcgattcttctgcctcagcttcccgagtagctgggactacagatgtgtgccaccatgcccagctaatttttgtattttttttagtagagacggggtttcgctatatgttggccaggctggtctcgaactcctgacctcaggtgatgcgcctgccttggcctcccaaagtgttggagtgttgggattacaggtgtgagccaccacgcccagccaactttttttttttttttttttgagacggagtctcgctcagctgcccaggctagagtgcagtggtatgacctcagctcactggaaccaccgtctcccaggttcaagtgattctcccatctcagcatcctgagtagctgggattataggcacccgccatggctaatttttgtattttagtagagatagggtttcaccatgttggccaggctggtcttgaacttctgacctcaggtgatccacccgcctcagcctcccaaagtgccaggattacaggcgtgagccatcgcacccggccaactttgtttttaagttagccaggcgaggtggcatgcgtctgtggtctcagctactcagggggctgaagtgggacgattaattgagcccaggaggtggaggctacagtgaaccatgttcacaccacggcactccagcctgggtgacagagtgagaccccatctcaaaaaaaaaaaaaatagtggacgataagtgtctcttccggcccagacatggtggctcttgcctgtaattccagcactttggaaggccgaggcaggggaatcaattgaagatagtagtctgagaccagcctgggcaacataacaagaccctgactctacaaaaaagaagaaaaattagcctggtgtggtggtatgtgccggtagtcccagctactcaggaggttgagtaggatcacctgagtctaggagttcgaggctgccacgagctatgatcgcaccactgcactccagtctggttacagagcaagacactgtctctaaaaataaataaataagtaaataaataaataaaatgtataaagtgaaaataatgtctactccatagagctatggtaaggattaaattagattgtgtcaagttctttttctttttctttttttttgagatggagtttcgctcttgtcacccaggctggagtgcaatggcacaatctcggctcactgcaacctccgcctcccaggttcaagtgattctcctgcctcagcctcccgaatagctgggattacaggcatgtaccaccacactccgctaattttgtatttttagtagagacgggtttctccatgttgaggctggtctcgaactcctgacctcaggtgatccgcccgcctcggcctcccaaagtgttgggattacaggcgtgagccaccgcgcctggcccctgtgtcaagttcttaaaacagtatcttgacatacaataagcattcagtaagtatagcaatttgcttaaactagttcaagaaggatgctgaactaacatccaaatgatcttaagaggctggatgcggtggctcatgcctgtaatcccaacactttgggatttgggagacagaggaaaaaaatacccatttgggcaaaaaatatccaaattgtcttaaggtctttcttttctttttcttttcttttctttttttttttttttttgagacaaagtctttctttgtcacccaggctggcgtacagtggtgcaatctcggctcactgcaacctccgactcccgggttcaagcgattctgtcctgcctcagtctcctgagtagctgggattacaggcgtgcaccaccacgcctggctaatttttgtatttttagtagggatggggtttcaccatgttggtcaggctggtctcgaactcctgacctcatgatccacctgactcggcctcccaaagtgctggattacaggcataagccactgtgcctggctggtcttaaggtcttaatactcacagaagaccaaaatttaaaaaaagcctgtaaaggagcggcaaggcacagtggctcacacctgtaatcccagcattttgggaggccaaggcaggtggatcatcaggccaggagttcgagaccagcctgaccaaaatggtgaaaccccgtctctactaaaaatacaaaaattagccaggcgtggtgacacacgcctgttatcctacctactcaagaggctgagacaggagaatcgcttgaactggggaggcggaagttgcagtaagccaagttctcgccattgcactccagcctgggcgacaaagcaagactctgtctcaaaaaaaaaaaaaaaaaaaagcatgttgtgtgctagtaattggtctttcatcagaccttatatgatacttaaatttctgtatctctactcccaacccacataattcctgggcattcctcattattgctccagggataatgtttgaaaacctagtgattattttttgcccattcaccagaactcccccttctcctcataacagcccccacatttaatgtccacttatggactctcccaggctccacccctgtgattcaaagtttctgtgccagctcaaagggtgggcgcaggacccaggcctggctaatcagcacatctcattcccctgaacacagtgattggtttagaggtggacacatgacacaaattggcccaatgggcgcctgctctgggactttttgctggagctgatgggaaggaggggctctgcttgcatgggatgggggagctgttgggatataagcctatgcctccacaaggtatgagcctgccttggagtagagctatatatatatatatgtgtgtgtatttttttttttttttttttttttgtagagacggagtcttgctctgtctcccaggctggagtgcagtggagcgatctcggctcactgcaacctccgccttccaggttcaagcaattctctcgcctcagcctcccaagtagctgggattacaggtgcatgccaccacacccagctatgagtacagctatattaaataaaatattatttgggctactgtaacagcaactcaaataatagtggcttaagtaagataaaaatttatttctcttttatgtaacactccaagtatcaacagtccaatatggtagctccctggtctcataggcccaggctccttctagcttgttgctcagctattcagacagtgtgaaccacctaatccaaaatgatccactccacgtcttcattcccaccagcaggagggaggaaagggggaaaagaaggacacaccgcttccctttaagggcaggttctgaaatttgttcacatcctttccctttatatcttattggccaagacttagccagtggccagatatgaccacaccttgctgcagaggaggtgggaaatatggcttttactttgggaggccagctaaaaatcagtggttccattaccatagaagaaggtgattaaatttgaggggacaatggactatctcattctcagagcaaatcagagcaaagagacagcaagaaaaccctgatgacatcttatgagtgcctggatgcaactgtgcctgaagccctactcattggacatttcaactgcataagccacaaatgtccttttttgcacatgcctctttgaattgggtttttggtcgcttgcaacagaaagaactcgattagtgcaatgagatgtaaagaccatagctgatgttctctgctgagtaggagctcataagtgggcatattattgtggttgtgactatgtagcagttcgccctacagctcatttcatcctctctattgtactccaacgctgacagagagctcacgcctctcttttcatcctcacaatccttttctttttcttttttttttttttccagacagaattttgctcttgttgcccaggccggagtgcagtggagcgatctcgactcactgcaacctctgcctgcctggttcaggtgattatcctgcctcagcctaccgagtagctgggattacaagagcctgccaccatgcccggctaattttttgtatatttagtagagaaggggtttcaccatgttggccaggctggttttggaatcctggcctcaagcaatccacccgtcttgcccccccaaagtgctagagccactgtgcccagcatttttttttttttttttgagatacagtctcactttgtcacgcaggctggagtgcaatggcatgatctcggttcactgcaacctccaccttctggattcaagcaattctcctgcctcagcctcctgagtaactgggattacaggcacccaccaccatgcccagctaatttttatattttttagtagggacagggttttaccatgttggccaggctgaccttgaactcctgacctcaagtgatccgcccacctcagcctcccaaaatgatgggattacaggtgtgagcactgcgcctggcccttttttttgctttttgaaacaggatctcgctctgtcacccaggctggagtgcagtaatctcggctcactgcaacctccacctcttgggctcaagtgatcctcgtgcttcagcctccagagtagctgagactacaggtgcaggacaccaaacctggctaaattttattttattttttgagatggagtctccctctgtcgcccagactggagtgcagtggtgcgatctcggctcgctgcaagctccgcctcctgggttcacgccattctcctgcctcagcctcccgagtagctgggactacaggcgcccgccaccacgcccggctaatttttttgcatttttagtagagacggggtttcacctagccaggatggtctcgatctcctgacctcatgatccgcctgcctcagcctcccaagtgctgggattacaggcgtgagccaccgcgcctggccaatctttgtatttttttgtagaaatggggtctcactatgttgcccaggctggtctcaaactcctgggctcaaaatccttccaccttagcctcccaaagtgctgggattacagatgtgagccaccacacccaacctctttttctcttctttgcacagatgggttatctgtgacaggaagaggaagaaggtgagggcaagtgaaagggcccatcctcacagcccttattgactcatgggtaatgatgctatttgtttctaattctgatggaatttcagttagtcactctcccatatatacagtagaaaagaggcatatcaccccaaaaatgttggggaaggaagtcctaaaccctctttgtgtgataggatcctttatttatttatttagtgagatgtgatctcactgtattgcccaggctgctctcggactcctgaacttaagcaatcctcttacctcagcctcccaaagtactgggattaccctcctgagccactgtgtccggccagacaggatcctctctggcatctgggttgagtgtcatacccgactcaacacctttcttagggctcttagtttttttgtttttgagacaggatctccctctgtcctccaggttggagtgcaggggcccagtcactgctcactgcagcttcaacctcccagggctctggtgattctcccagctcagcctcccaagtaggtaggattacagtctcatatcaccacactcagaaaattttttgtttgttcatttgtttgtttgtttgtttttgagatagggtcttgctctgtcacccaggctggagtacagtggtgtgatttccactcactgcaacctccaccttccgggttcaagcaattctcctgcctcagcctccccagtagctgggattacaggtgcatgacaccacgcccggctaattttttgtacttttagaagatggggttttgccatgtcggccaggctggtctcgaactcctgacctcaggcgatctgcctgccttggcctcccaaaacgctgggattacaggcgtgagtcaccacgcccagccaaatttttgtattttttgtagagacaggatctcgttatgttgcccgggctggtcttggctcttaggtttctctctctctgtgtgtttgtgtgtgtgtgtgtgggtgtgtgtgtggtagctgttttcctttatcttgataaagggtgaacatggcacacaggcgcaaaataaacaagactgacacctgtttcataactctggtcactattttcatccgcatctgtcacttctgatgcgtctctaacatttataagatttctctggggagggatttgacgtatccatgccccacctctttctacatttatgggattgagctctccaccagccacccatgggctgatgtctttggaatatggatctagtaccaacagagtcagaaaaagagatggggtccaatgggctacagttgggtggtggtcctgggatacacagcacagtggcctctactgggggatggcagctttccaggagaagagtcgcaagcttgcctgtgggacttgtgtcttgtggagaggacagggctgcctcagcttggggagacagacagagtgttccgggtcccctctttccgccgcagcatgaagtctctgggggcgactggactcatggcatagaagacgttggcattgtcaggaatcaggagcactggtcaggagtggagatggtggtaataggccctcacaaccttgtgtcacccccacagaggacccgggagcctcctgccactcacccgcgaacctgaacagccatgggtccctctgcagctactgccaagccaagctcattctgctgtcactgggaacctggacgacttctcacttgaaaacttgcaccacctcatgccttcccttatcataagcctgggcaacctcctaatattctccccctcaccatagagacaaggcaacctgcagtaaaagtttgagcaaactggccgggcgcgatgcctcgtgcctgtaatcccagcgctttgggaggccgaagtgggtggatcacttgaggtcaggaattcgagaccagtctggccaacatggtgaaaccccgtctctactaaaaataccaaaaaaatgagctaggcatggtggcacatgcctgtaatcccagctactcggaaggctgaggcaggagaatctcttgaacccaggaggtggatgttgcggtgagccgagatcctgccattgcactccagcctgggcaacagcacgagactccatctcaaaaaaaaaaaaacaaaaacaaacaaaaccgacaacctgcagtaaaagtttgggcaaacttagaccaccctagaccaccccccgccaaacaacttcctgctcaccctacccctcccccacaaccactcccagccaatcccatgctgctgtcaccatgaacttgaataacttcccacttccagcctgcacgagcttgtggcctcacactcaacacctgaacaaccacaagcatcctttcctaatatccagccaacctcatgccatgtacttcagcgtgaatacgctcaatcccttgcttctccctgtcagacaggacaatctcatgcttccgcggctatccatttgcctctctcccgtcccaagttcagataacttcagggtcccagtggtgaacaaacttagttctcacaaatctaagcccagatgccctttagtctcccatcccatcaggttgagcctgaacaatctcatgatgctacaaacttaagatcagacaaacttctacactcccttctctcactcgaccctagacaatctattttttctttttttttgagacggagtctcactctgtcgccaggctggagtgcagtggcgcaatcttggctcactgcaaccttcacctcctgggttcaagtgattcttctgcctcagcctcctgagtagctgggactataggcgcctgccaccatgcctggctaattttttgtatttttagtagagacgaggcttcaccatgttggccaggatggtctcgatctcttgacttcgtgatccacccgcctcggcctcccaaagtgctgggattacaggcgtgagccaccatgcccggcccccttttttttttttaattgagacagggtcttgctctgtcacccaggctggagtgcagtggcgtgatctcagctcgctgcagcctccacctcctaggctcaagtgatcctcccacctcagcctccccagtagttggagttgggaatacaggcacatgccaccatgctcagctaatctctctctctctctctctctctctctctctctctctatatatatatatatatatatattttttttttttttttttttttttttttgagacagagtcttgctcagtcgccaggctggagtgcagtggtgcgatctcggctcactgcaacctccgcctcctgggttcaagcgattcttctgcctcagcctcccgagtagctgagactacaggcatgtgccaccatgcccagctaatttttttgtatttttagtagagacggggcttcaccatgttggccaggctggtctcgaactcctgacctcaagtgatccacccgctttggcctcccaaagtgccgggattacaggcgttgagccaccgcacccagccaatttctctattttttgtatagatggggtctcctcatgttgcccaggctggtctcaaactcctgagctcagacaatccacccaccttgacctcccaaagtgctgggattacagttgtgagccaccatgcccagcccatcctacaaattgaaggtcagaaacactcccttctgtcacttgtccgtggacagtctttttttttttttttttttttaaacagagtctcgctctgctgcccaggctgaagtgcagtggtatgatctcggctcactgcaacctccgcctcccagattcaagcaattattctcctgcctcagcctcctgagtagctgggactacaggagtgtgccaccacacccgactaatttttgtatgtttcgtagagacggggtttcaccacgttggtcagcctggtctcaaactcctgacctcaagtgatccgcccagcttgacctcccaaagtgctgggattacagacatgagccactgcgcctggccggaccctggacaatcttattgtcttttaaattttaggaagatgacctttggtacctctctctcacactgagccaagacaatctcatgaccctacatcgttgggttacaggtattttatgtcctcttacctccactgattatcttacccctactctctgcctgaagcacctcacagccctgtgaacccgggtaaccttgggctccatccttgggcgtggtcagtctgctcgcctccccgctgccccctatcctgagctccaacccatccctgctcaccccggtccccaggaaggacttgaaagagctgatagtcacaggcccagggctggggcacattgtgcttctgcaaggctcgccggaccacgctgggggctttgtcctgactggtcagctggaagagaggggcgggaggtgaggtgagggccccggccccaagggcagggcagcctccagcagacccccagcccagcccctcaccaagatgcttcgatacaggttcccgtggtcattgtcgatgctgacgcggatgacacgggcctccgagctctgctgcgccgggagggggattcgagggctgcccagaggcaaagcgaagggccgggggctgggcaggtccaggctcaggggcagctgcaggcagtaaggggtggaggctacagcttggcccatctgcagatgctgagggctagaaaagcacgaacaccccagccaccactggtgcattcaatagccccacatttaaaatctcaagaaaacattggctgggcgcagtggctcatgcctgtaatctcagcattttgggaggccgaggtgggcggatcacttgaggtcgggagttcaagaccagcctggccaacgtggtgaaactccgtctctactaaaaatacaaaaattagcagggcctggtggcgcatgcctgtaatcccagctacttgggaggccgaggcaggagaatcacttgaacttgagaggcagaggttgcagtgagccaagatcacgctactgcactccagcctgcgtgacagagcaagactccatctcaaaaataaataaataaataataaaataaaataaaatctcaagaaaacatactactaccccctacacatgcagagcctgggacatgcaactggagtacattcacaagcctgcatatacaccaccctaccatatacagactttggttacctgttatagaaacagacatgaacagtgtccatatacacacaacccatgctcatacacaagaaatcctgtgtacatacatatgctgacagcggttatacacccacagcccatgccaatgaacaaccccacacatgatctcatgaatactcaggcccacatttcctcttctggtacacagattcttttctttttcttttcttttttttttgagacagagtcttgctctgtcacccaggctggaatgcagtggtgccatctcagctcactgcaacctctgcctcccaggttcaagcaattctcatgcctcaccctcccaagtagctgggattacaggcctgtgccactatgcccagctaatgtttttatttttagtagagacggggtttcaccatgttggctaggctggtctcaaattcctggcctcaagtgatccactggcctcggcctcccaaagtgctgggattacaggcatgagctaccatgcccagccttcatttccttcatttccttttctttttttgtttttcttttagagggagcctcgctctgtcaccaggctggatggagtgcagtggcaccatctcagctcactgcaacctccgtctcctgggttcaagtgattctcctgcctcagcctcccaagtagctgggactacaggtgtgcgcgaccatacccagctaatttttctattttcagtagagacagggtttcaccacgttggccaggatggtctcgatctcttgacctcgtgatccgcccacctcggcctcccagagtgctgggattacaggcgtgagccaccgtgcccagtctctttttcttcataaacaggatctcgctctatcatgcaggctagagtgccgtggcatgatcgtagctcactgcagcctcaaactcaagcgatccttccacctcagcctgctgagtagctgggactacacccagctaatttttttgacttttaatagaaatagggtctcactatgttgcccaggctggtcttgaactcccggcctcaagcaatcctcccactttggcttcccaaagtgccgggatcacaggcaatagccaccgtgtctgccatggtatgcagattcttagggacatacatgtcctcaaaaaagtgtaggctgggtgcggtggctcacacctgtaatcccagcactttgggaggccgaggtgagtgcattgtttgagctcaggagttcgaaacccacctgggcaacatggcgaaacctcatctctactaaataaaaaaaatagcagggcatggtggtgcacacctgtggtcctagctacttgggaggctgaggtggaaggattgcttgagcctgggggaggggtggaagttgcggtgagctgagattgcaccgctgcacttcagcctgggtgacagagcaagaagaccctgtttcaaataaaaaggggtgtgatgtgattgcaccctagatgacccatgggcaagcagttacacaggtccaaatctgagcacgagtcggatttatgagtgatcacccaaacagggccgtgcagatgcatgcaatcccctggatggataccccgggcgctcagtgtgcctcctgtatacactcctggccccacaatcctgtgtgtacacatgtgcatgcacacacacgtgcacacacacagagcctgggtgcccgcaggcccgcatgcacacacaagccgtcttggtaccttggtgctggggccctggggccctggagaggccgggggactgccagcaggagcatctctgcttctaggacttgaggggggtgaccctggggacacactgggggagatgcagaggctgaggtggggtggctgtgctgactcctgatcccatgatccccagtcccatcaccaagcagaatgctcacctggaggtgggggatgaggggtccccgggactcccactaggtgatgagcttttctctcgggcaagcttcctaaggatggggacaggggatgaggctaaggcaggagcagcccttgctgatatctgcccacatcaccgcccctacacacaccccgagactcacgcactgagacgcttggtgaggctgatccgccgtcggatgcgtggggagctggggcaggaggcagctggtggctcaatgacccgggagagccggtagctgaggggtcaatatgtggatgaggtggtgggggcaggaaatacaggggatggagagataagagttggaatcagttgggaggtgggtttggggtgtaagggggagcagccagaggtggcaccccacatgccagggtcagggtggtaaatgagggtcattgagcatcaaggtcttatcagagatgggacaggatggctggtcaggaggtcacaaagagattcacagggtggcactaaggaatcaaattgggtcaggattaaagtcagggtcaggactgggtgcagtggctcacgcctgtaatcctagcactttgggaggctgaggcgagaggattgcttcgggtcaagagttcgaaaccagcctggccaatatagtgaaaccccgtctctactaaaaatacaaaaaaaattagccaggtgtggtagctcgcgcctgtaattgcggctaccggggaggctgaggcagtagaattgcttgaacctgggaggcgggggctacagtgagccgagatcactccactgcactccagcctgggaaacagagccagactctgtctcaaaaataaataaataaataaataaataaataaataaataaataaataaaataaagtcagggtcagactggggtcaggtcaccattggggtcaatggttagggtcacagttatatagaaagaaaggacacagttgtcatagtcaagctggacagtcaaacataaaagttggagtcagttactcagaactgagggtcaagggttggggtcagagagtcagatgaggggtcatgaataaggtcatgggtcagataggaccaaagatggggaagtcaacagatgggacagttgagttgaatggccagctgaatgctaaagttgaggtcagaaaatcagatggggttgaaattgaggtcagaggtcaattgtgactatttttttttttttttttttgagacagggtctcactctgtcacctagactggaactgcagtggcgtgattttggctcactccaacctctgcctcccaggctccagcaatcctcccacctcagcctcccaagtagttgggaccaacggcactcaacaccacattcagctaattttttttttttttttttgagacggagtctcgctctgttgcccaggctggagtgcagtggcaccatctcggctccctgcaagctctgcctcccgggttcacgccattctcctgcctcagcctcccaagtagctgggactacaggcgcctgccactacacctggctaattttttttttgtatttttagtagagacggggtttcactctgttagccaggctggtctcaaactccttacctcatgtgattcacccgcctcggcctcccaaagtgctgggattacaggtgtgagccaccgtgcccagccacgttcagctaatttttgtatttttttgtagatatggggtttcgccatgttgcccaggctggtctcgaaatcctgggctcaagtgatccacccaccttggcctcccaagtgctgggattacacgagtaaaccaccaggcccagtctatttgattcgactggagatactgcaaggtcacaggttgtagtgggggatcagggctcaagagggggtcttgggaggagctggaggtgtgtatggagtgggtggaatccagttggtgacccaggctcagctggggtggggctgggacaggctacagggtggtcacctctgctcctcggtgagctggttctgggcatgcagggcagccaggatgggcgggtgggggctcagggtgtagctctgacagcgcctctgcagctgctggatgcgggccaggatctcccactcctggaggacgagcctctaagaccctacccctgccccacccccaccctcaggcaccaccacacccactgtagcctccactcaccttcctcctcttctcaaagttaatgagatccccctgggggcaaagtgtgtctgaattgcagcacccagggtcaagggtcaagggtcaaggtcaggggctgggatgtcaggagccccactgtagtaagggagtgtggggtggtgtcaggagtacaggtaggatcaagggtggatattgggaggcccattgtgctgggggcaagtggagctggggtcaggggtcaagggtcaggggtcagacctccaacatatccggcagggctgtgtccagcataaccaggtccgtaaggaaggtgccaaggtaggggacagggcctgggggtggtttctgcagcccccaaagctccagtcacttggggccattactgaccccatcaccatccacaaccctccctgaaggtcccacttgtccccatcccaaactgtaatcactcactgagggcaggctgcctggggtgttgtcctcttcttgggatccctcagtggcctcctcctgagggaagagaaaaactgagccaggtctggggtctccttggacaattcctcaggaacgatgcctgcagacccatcatatatacccttcatgctttgagtaatcaaaagtcagtggtaggccaggtgcgatggctcacgcctgtaatcccagcactttgggaggccaaggcgagcagatcatgtgaggtcaggagttccagaccaccctggccaatatggtgaaaccctgtctctactaaaaatacaaaaattagccgggtatggtggctcacacctgtagtcccagctacttgggaggctgaggcagaaggatagcttgaacctgagaagcagaggctgcactctagagggagtgtcgctctgtcacccaggctggagtgcagtggcgcgatctcggctcactgcaggctccgccccccggggttcacgccattctcctgcctcagcctctcaagtagctgggactacaggcgccccccacctcgcccagctaattttttgtatttttagtagagacagggtttcactgtgttagccaggatggtctcgatctcctgacctcgtgatccgcctgcctgggcctcccaaagtgctgggattacaggcgtgagccaccgtgcccggccaaaaaaattttttttaagaaagggctggacatggtggctcacgcctgtaatcccagcactttgggaggccgaggctggtggatcacatgaggtaaggagtttgagaccagcctggctaacagagtgaaactctgtttctactaagaatataaaaaactagctgggcatggtagcatatttctgtaatcccagctactcgggaggctgaggcagaagaatcgcttgaacccgggaggcggaggttggagtgagccaagatcgcaccattgcactccagcttgggcaacaagaccaaaactccatctcaaaaaaaaaaaaaaaaaaaaaaagaagccaggggttaaggcccactctagaagccagaccaccttggatgagggtagggaggagataaacagcagggagcaggccccatgagaggtggggcttgtgggtagtggcccccagggctggccttaacaaggagagaatccttgtccgcagctggatggcacaggcctgccagggatctcctgggtatcctgaatttgctgttgtttacttactttttatttcattttattttgagatggagtctcactttgtcactcaggctggagtgcagtggcctgatcttggctcactgaaggcttgaccgcccaagttcaagcgatcctccctcctcagcctcctgaatagctgggactacagacgtgcaccacaaacgcccagctaattgttgtattttttgcagagatggggttttgccatgttgcccaggttggtcttgaactcctgggctcaagtgatcctctcaccttggcctcccaaagtgttgggattataggcgtgagtcactgagcccagctcacgtgctgttctaggtgctgggcaggaaaacagggtttcactctgttagccaggtgaaatttggctgggagtgatggctcacgcctgtaatcccagcactttgggaagccaaggcaggtggatcacctcaggtcagggattcgagaccagcctggccaacacggcaaaaccccgtctctaccaaatacaaaaattagccaagcgtcgtggtgggtgcctgtaatcccagctacatgggaggctgaggcagagagaattgcttgatcctgggaggtggaggttgcagtgagccaagatcgtgccactgcactccagtctgggtgacagagcgagactctgtctcaatacaaacaaacaaagaaacaaaaaaacaaatgatgacgacaacaacaacaacaacaaaaaaccagatgtgtggttttggggatgatggaggctgggaaggcctctcagaggcagggacatttaatcagagaccagaaggaggtgagtgagcaagttgcatgcaaacctggaggggtggagaatgttccaggcccagggatccattctagattcactctaaaaaccagcgcctgattgcaatgagaatctaaatcttgcctataaataagccagacttttgacacacattttttagttttgcttatcaaggtaaagtcctcagaacattttttttgttcccaccctgtgctatgactctggccttaagtaaccttttctttgtgacttcttgtgttttgctgagtgaataaatagggcagtcactgacagtcaactataacgcaggaagtagaggaaagaaaaacgtgcaacccgccagggacaaggataaggtcattgctgagcggtagggaaggacagagtgtcctgactatagcagggagattacccctgcctggccccaagtccctcccccgacttcccgggcctaaaatccctggagtctgcatccatctctacctggaaaagaatctctctgctgctgaggtggttgttctcatcggagaaaatctgcgaaagtttcctgaaagtagatagcggttccctggaaggacaggagaagggtggtcaggggtcagtggcttgggagggtcagacctgggatgggctggggaacaggtcccgccccagctcaccggctcactgccccccagctgcgcttgagccggtagatggggttagattgcagggcggacaggatggcgcgcaaggaggagaagttccgcagttctcggcagcgctgccaggcggtggggacgcaggtcagacccaggcattatccacctttcatcctgaaacttcttcatctttttttttttttttttttttttttttttttttttttttttttttgagagatagggtctgtggcccaggctggagtgcagtggctcgatcatagctcacttgctgcctggaattcctgggcttaagcgatccacatgcctcagcctcctgcctcagtagctgggactacaggcgcgcgccatcatgcatggcttattattattattattattaattatttggacagagtctcgctttatcccccaggctggaatgcagtggcccgatctcgagtcactgcaacctccgcctcccgggttcaagtgattatcctgcctcagcctcccaagtagctgggattacaggggcacaccaccacacccggctaatttttttgtaagtctcatttttaatttttttaattttttttttttttctagaaacattggtctcactatgttgcctaggctggtctcaaactcaagggctcaagcgatcctccctctccccaaagtgctgggattacaggcgtgagtcactgcgcccagcctgatcccgtgacttgtgacgccaggtcggacccctgggtgttgtctcacatccgacaagctaccaagactcccacttattccctaggattcccttcctccctcctccctcgggctccagcccctccccagctgcccctccagcccctgcctccgaccttgacttctccggtccgggctccctacttctcccagctcccttgggacctagtcgtgcccgcggcctctctgcaggacccagaccctcctccctgaacccaagtctcaccctaggtatcaactttccaccccgttccctccctcgcctagactcgcccctatctctctccggagccctcattttttccccttgccccagggcccgcccccgcatcccctctccgcgcccgcaacacacctgggcgatgcggatccacttctccagccgctgcgccctctgcggggcggccaagcccggtgctccgagcacggaacccagcacacagccggtcacggtgttgaactgggccacggtggcgcgcacagtgggggaggcgcctgcagcccccggccggtccctctgcgaccacacggagcccaagcactcgtagagcctcaccttggagaagagctcctgggccaggggaggggtgtgggattggtgcttagcagaacctgtcccctcactgtggctcatcccgaccctgtccgggatcctcaccaagtctatgagggtcagctgctcggccacctcgtccacgctgaagtccaggagctggggaccttgaggcatgagcccttcctcttcctccgcgcaggcctctgaagagtctgggtcagaagtttgggcaactctgggaggtcctgatcattagaaagggttacaaactctcaagtttgaatccaagactggctgtgtgaccttgggtgagtccctgtccctctctgaggctcactttcctcatttgtaaaacggagagctctcttaaatttttttttttttttgagacagtcttactctgttgcccaagctggagtacaatggcgcaatctcagctgaccacaacctccgcctcctgggttcaagtgattctcctgcctcagccttctgagtagctgggattacaggcatgtgccaccatgcccggctaatttttgtatttttaatagagacgggctttcaccatgttggccaggctggtctcaaactcctgacctcaagtgatctgcccgccttggcctcccaaagtgctggcattacaggtgtgagccaccacgcctggccctgagtgtttttaaggatgtaacagcaacagtaatgttcactaagcagctagtgtggatttactcagtaactcaccactgagttactgtgagtccagtgagggaggtactattatttatccaccttttacaattaaggaaagggaggcaaagaacaatttgtcacacctttggtaaatggcagggcaggggtttgaagccgggtactcaaaggccagagaagaaaatagagctttatgatttttaacatgtattaggataagattaatctgacctcttttttttggaaagaggtgatacgacttcctggttcagggaaggctattgtcagaaagtctcaaactcagatgcaaactcgtccactagcttgctgtgtagagcatgtattttaacctctctgtgccttttttttttttttttaagacggagtctgactctgtcgcccaggctggaatgcaatggcgtgatcttggctcactgcaacctccgcctccaggtttcaaccaattctcctgcctcagtctcccaagtagctgggattacaggcacgagccaccacgcccagctaacttttgtatttttgtagagacagggtttcaccatgttggccaggctggtcttgaactcctgacctcaagtgatctgcctgcctcgacttcccaaagtgctgggattgcaggggtaagctgtgccttctttttgaaacaggctctcccttggtcacccaggctggagtacagtggtgtgatcacagttcactgcagcctcaaccttttgggctccagtgatcctcctgcctcagcctcctgagttgctgggactataggcacacaccaccatgcccagctaattttttattttttgtagagacagggtctcattatgttgccaggctggtctcaaacacctgggctcaagcgatcctccctcttggcttcccaaagttttgggattgcgggtgtgagccagtgcgcctggctgtggatttcgtttttgttttcgtttaagatcatgctgccgggcgctgtggctcacgcctgtaatcccagcactttgggaggccgaggcgggtggatcacctgaggtcaggagttcgagaccagcgtggccaacacggtgaaaccccgtctctactaaaaaaaaatacaaaaattagccgggcgtgatggcacgcgcctgtaatcccagctactcggggggctgaggcaggagaatcgcttgaaccctggagacggagcttgcagtgagccgacatcgtgtcactgcactccagcctggcgacagagcgagactccatctcaaaaaaaaaaaaaaagatcatgctaccagactgctataaagtgctgaacaaatatgaataattttactttagtggattttgatggtggcaccctggaggggaaactttggaaactgggatcctgaattgtgccctctagcctccaaatgtatctccagacatttgtgtctttgaaaaacctgtttgtggctggtcccaaggtagtgacttatctcaattgattgttcacagttacagatcgaactccttgttctactctttccccccttctcactactgcacttgacttgtctttaagaaaggaagaaggggtctggcacagtggctcacacatgtaatcccagcactttgggaggccaaggcaggcgaatcacttgaggtcaagagttcgagaccagtcgggccaacatggcgaaaccctgtctctactaaaaatacaaaaatcagctgagcatggtggcaagtgcctgtaatcccagctcgggaggctaaggctagagaatcacctcaacctagaaggtggaggttgcagtgagccaggtccacgccacggcactctagcctgggtgacagagactttgtctcaaaaaaaaaaaaaaaagaaaagaaaagaaggccgggggcagtggctcacgcctgtaatcccagcactttgggaggccaaggcgggtagatcacgaggtcaggagatcgagaccatcctggctaacatggtgaaaccccgtctctactaaaaaatagaaaaaattagccaggcgtggtggcgggcgcctgtagtcccagctacccaggaggctgaggcaggagaatggcgtgaaccggcgaggcggagcttgcagtaagccgagatcatgccactgcactccagcctgggcgacagagcgagactccatctcaaaaaacaaaacaaaacaaaacaaacaaacaaacaaaaacaaaaagaaaagaaaaacatgtttgcaataatatgcacctagaacctgactattttgttcataaacacaaatttttttggctccaagaatgcaaggaccacgaaagtctgggctttgttttgtttgcaaattgcaaatgttgttcacaagtttggaaaatgatgtccccagaacctatgttgctgtctttgcctcaccagtgccctcctgtgcgttcgttggtgcttgttgctgtcagtacaacagcaccgtgacactctactgtgacgctaggacaggcaaagacacgggacaacctcatcatgtgtcctagtggggcatacccaagcattacccattgaaaacatggtttattgctgtgtaagttactctcactttccttctcctttgtactagttatggcatcatactattattttattttatttttttattttgtgatggagtcttgctctgtcgcccaggctggagtgcagtggctcgatctcggctcactgcaacctctgcctccagggttcaagcaattctcctgcctcagcctcctgagcaactgggactacaggaggtgccactatgcccagccagctaatttaaatatatatatatttttttattatttatttattttttattttattttattttattttttattttttttagtagagatggggtttcaccatgttggccggactggtctcgaactcctgacctcaggtgatcctcctgcctcggcttcccaacgtgctgggattacaggcatgagccatagcaccctgccccaatactattattttaaaataatctttgtaaatctgtgtaattacctctttcatcttgaattaggacaggtggcattgcaaaatattagtttttagaagtgggtactgggctgggcacacctatagtcccagcacttttggaggttgaggtaggaggattgcttgagaccaggagtttgagaccagcctgggcggcgtagtgagaccccatgtctacataaaaaaatttttaaagttgcgcatcctgatgcacacctgctgtcccacctactcaagaggcttaggagggaggatctcttgagcccaggaggtcaaggctgcagtgagctgtgatcatgccatagcactccagcctgggtgacagagcaagaaactgtctctcctccccccaccccaaaaaaaagtgggccctggaaaaaaaaatgccctacatctaatcaaacctttaaatcttacagcaattatggggatagagaaacatgctgcatgaaaccatgaggtaagtcgaaaagaatgtgagacatacctcaggaaaaatgacccattttttttgccctctaatggcttcaaacaagaggcaagggggatctgttacagaataaaagagacttaggaacaaacgaccggtagggcgtggtgactcatgtctgtaatcccgacacttcgggaggccgatgtgggcagatcactaaaggttaggagttcaagaccagcctggccaacatggtgaaaccccctcactactaaaaatacaaaaattagctgggcgtgttggtgggcacctgtaaactcagctactcaggaggctgagccaggagaatcgcttgaacccaggaggcggaggttgcagtgagccaagatcacgccactaccctccagcctggacaacagagtgagactccatctcaaaaaaaaaaaaaaaaaaaaaaagagaagcaaacaaccaaataccttgagtagatctttggatttcaatttgaagaaacaactattcctccttcccccagctctatcgcctggagtgcaggggcatgctcacagctcacggcagctttgatttcccggagtcaagagatcctcccatctcagcatcctaagtagctgggactataggcatgtgccacaacacctggccagaaacaactgtcaaaagaaaatttagggctgggtgccatggtgggcacctgtggtcccagctactcaggaggctgaggtgggagggtcaggagttcaagcccagcccaggcaaaataggaaaacccagtgtccaaaaaaaggttcaggcacaaacaggggatttgaatatttgaatatagactgggtattttttctgtttttgaggcagggtctcgctctgtcacctaggctggagtacagtggcataatcacggctcactgcagccttgaccatcccaggctaaaatgatcctcttgcctcagcctcccaagcagctgggactataggcagtcaccaccatgcccagctaattatttgtagacacaaagtttcaacatgttgcccaggctagtctcaatctcctgggctcaagccatccacctgccttggcctcccaaaatgctgggatcgccagcaggagcctctgcatctggcctggattggattttttttatatcaaatatttctgatttttttttaagtatgaacatgaaggttattaaaaaataaaaataaaagggccgggcgccatggctcacgcctgtaataccaacactttgggaggccaaggtgggcggatcacctgaggtcaggagttcgagaccagcctgacaaacatggagaaacccccctctctactaaaaatagaaaattagccgggtgtggtggtgcacgcctgtaatcccagctactcgggaggctgaggcaggagaatcacttgaacccaggaggcagaggttgaggtgagctgagatcctgccattgcactccagcctgggcaacaagagcgaaactccgtctcaaaaaaaaaaaaaaaaaaagtaagcctgttgtcagacatgtgtacccaaaacatttatgtatgaattgacataagcccgggatttgttttaaaatcatcctgaaaatatttttttgtgaaattgatcatcgttgatgataggtgatggatgtctgaatgttcttcatactattctctctacttttgtatatgtctgaaattttccatagcaaaaagtgaacccaaaataaagttgttaaaataaaatagatgagcatggtggtcatctactttcttctaaactacatggtgcaagtgtagtcttagctactcaggaggctgaggtaggaggctcacttgagcccaggagttcgagtccagcctgggcaacagagcaagaccctgtatctaaaaataaaattcatagtcgggtgcggtggctcacgcctgtaatcccagcactttgggagaccgaggcaagcggatcacgagatcaggagatcgagaccatcttggctagcacggtgaaaccccgtctctactaaaactacaaaaaattagctgggcctggtggcgggcgcctgtagtaccagctactcaggaggctgaggcaggagaatcacttgaacccaggaggtggaggttgcagtaagccaagatcgcgccattgcactccagcctaggcgacagagcgagactctgtctcaaaataaaataaaagtaaaaataaataaaataaaataaaatgaaataaagtgtgtcccagggcctagcacatagaaggtcttaaacaaatgttaattttctcctctgacctcaaagaaactagggcagcactttccatataattctctgcaatggtggaaaaattatctatctgctatgtccagtgtggtggctgagcactcaaaatgtgggtagtgggattgaagacctgaatttttgcctttgcttgactggattttgaaaaagaaaaaaaaaaaaaaaaaaagcgggccaggcatggtagctcacgcctgtaatcccagcactttgggagaccgaggtgggtggatcacctgaggtcaggagttcaagaccagactgaccaacatagtgaaacgctgtctctaataaaaatacaaaattagctgggtgtggtggcaggtgcctataatcccagctacttgggaggctaaggcaggagaatcttttgaacctgggaggaggaggttgcagtgtgccgagatggcgccactgcactccagcctgggtgacagagcgaggctccgtctcaaaaaaaaaaaaaaaaaaaaaagggcagggtcaggcacagtagctcacacttacaatcccagcactctgagaggttgatgctggaggattgcttaagcccaggagttcgagaccagcctgggcaacatggcaagaccccatctctaaaaagaaaagacctgaattttatttaattttaattaattaattaattattattataattttgttttttggttttttttttttaggcagagtctcgctctgtcacccaggctggagttcagtggcttgatctcagctcactgcaagctccgcctcccaggttcgcgccattctcctgcctcagcctcccgagtagctgggactacaggcgctcgccaccacgcccggctaatatttttttgtatttttagtagagacggggtttcaccatgttagccaggatggtctcgatctccgaaccttgggatccgcccccgtcggcctcccaaagtgctgggattataggcatgagccgccgcgcccagccaattttaattaatttaaatagcgacaggggctagtggataccacagtgaactatggagctctaatgacttggaatcagctggagaaatcatatatatatatatatatatatatatatatatatatatatatacacctatatatatatacctttatatatatatatacctttatatatatatacctttatatatatatatacctttatatatatacctttatatatatatacctttatatatatataccttcatatatatacatatatatatataccttcatatatatatatatacctttatatatatatacctttatatatacctttatatatatatatacctttatatatatacctttatatatatatacctttatatatatataccttcatatatatacatatatatatataccttcatatatatatatatatatacaccttcatatatatatatatatatatatatatatatatatatatacctttatatatatataaataactgagactttgtcaccagggatagagaagtggctgctactttgtaaattggacaggaaggtggccactataatctggagattaagcgatggggattagggatagagatgcttttgtgatgtggatcagatcaaatacagatgggtgaaagatgatacttcctaagcaggatgcaattattcagcaaactaatctgtgttgttcctgcccctggggacagagctgggagcaagaacaacaggtcctcctctcatgcactcacagcctatgagatgagcaaaagccaataatcaagtaaggaggctacgcatgcacaatggcttatggctgtaatcccagcattttgggaggccaaggcaggcagatcacttgagttcaggagtttgagaccagcctgggcaacatggcacaacctcacctttacaaaaaaattagccgggcgtggtgacatgcgcctgtggtcccagctactcaggaggctgagacaggagaatggcttgagcccaggaggtggaggttgcagtgagccaagattgtgccactgcactccagcctgggtaacagtgcgagactctgtctaaaaaaaaaaatagataaaaaaataaaattaaattaaattaaatttaaaaagaaattcaaaaataagaaaaattttacaggctaggtatagtggctcgcgcctgtaatgccagcagttttggagacccaggcgggaggatcacctgagtccaggatgttgagcctgcactgagccatgatggagacactgcactccagcctgagcaacggagcaagaccctgactcaaaaaaaagaaaataaagacaagtatcaaggcaatggtttgtagctagaaacacagagcatcctgacccaacggcaccaaggagggaaaagtattagacacatgctaatacttcagacaaagaatttgtttttttttttagacggagtttcgctctggttgtccaggcgagagtgcaatggcacgatctcgactcaccgcaacctccgcctcccgggttcaaacgattctcctgcctcagcctcccgaatagctgggattatagacatgccccaccacgcccggctaattttgtatttttagtagggatggggtttctccatgtttgtcagactggtctcaaactcctgacctcaggtgatacaccatccttggcctcccaaactgctgggatacaggcgtgagccaccacgcccggctgacaaagaattattatccccattgtaaagatgaagaaattgaggcttagagtttaaaatcttgcttaagttttgtagctctgagaggggagagaaagcctgtgtgggaagaagcagacaggaaaggccttctcagaacacgactggatctgaaaacccctcacctgtccacacctgaggcggctcctcttcctgctctcgctcagcctcctccaaaaaatcttccagaagcttctctgctttttgagcctcagcactccctggggccgcccagcccagaaaggttcggacactgcccaggtccgaatgggcagggtggtctcggaaatcctgagggtggtcctgcagccaggagcccagcactgacaccacagccctggccagagaggcagggtctcagagctgggtccagagtgggggacatagaatatgactcctggtaccttttttttttttttttttttgagatagagtcttactgtgtcaccaaggctgcagtgcaatggcctgatcttgactcactgcaacctcagcctcccgagtagctgggactacaggcatgcgccaccacacccagctacctttttttgttgttgttgtatttttagtagagacagggtttcgccatattggccaggatggtctctaactcctgacctccagtgatccacctgcctcggcctcccaaagtgttgggattacaggcatgagccaccacgccccacctgactcccagtctcttattacccaacctgcaattttcaaaaccccagtccgactgctaacctttgacctcttggatttccctccccgcactcccctatctggatgaaggacccacctcaggttcttgttgaagctcagatcttgtaccgctgtcttcttgatctctaccctgggaagaggccccccagcaggtgaagaagggggaacctagagggggcttaggaagagggctctgggtctgggaggtgtttccaggttccacacctgaggaggtggaggggggtgcccagttggggttctagggtggagaatacggaggttatggttcgctactgacccgggaggtgggggcggtggcattggtggcagcagaaagcccagcaggcaggcagtgggtacaaaggtccggtaggtggccaggaaggcgggcatgaagctggggtcctgctcacggtctccaaacaccaactctcccaccagccgctccaggcgcgctgccctcagcaccctcaccttgctggttcgatagtggaggaaggtattggcaatggggctgggagcctgcaggaggggagaggtggccatgagagagcaggagtggtcctcacagcaccccttctctagtcacattcatcactagcaccactctttttttttttgtttttttttttgagacagagtctcactctgttgcccaggctggagtgcagtggcacgatcttgggtcacttcaacttctgcctcctgggttcaagcaatcctccttcctcagcctccaagtagctgaaactacaggcgcacaccaccaagcccagctaatttttgtatttttgtagagatagggtttcaccatgttggtcagactggtctcgaactcctgacctcaagtaatctgccccccttggcctcccaaagtctcccaaagggctaggattacaggcgtgaaccaccgtgcccagcccctagcaccacttttttttttttttttttgagacagaatctcactctgtcacctaggctggagttcagtggcgtgatcttggctcactgcaacctccgcctcctgggttcaagcaattctctgcctcagcctcccaagtatctgggattacaggcacccgccaccaagcccagctagttttttcgtatttttagtagagacggtgtttcaccgtcttggccaggttggtcttgaactcctgacctgatgatccacttgcctcggcctcccaaagtgctgggattacaggcgtgagccacctcgccccgcctgtagcaccattctttcatgtgattcctctgtctcccggcttcttggagttattgttttggtttgttttttttagaaacaggtcttgttttgttgcccaggctggggtgcagtggcacaatcatagctcactgcagcctccaagtcctagactcaagcggtccctctgccccagcctcctgagtagctgggaccactgctgggcatcatcacgcacagctagttttttaatttttatttttattagagagaatcttgctgtgttgtccaggctggtctccaattcctggccttctgccttggtctctcgaagcgcagggattataggtgtgtgccccactccctgcccgcttgaagttattgttcctccccatccacaaatagctcctgcaacttgccctggaaaccctccctctcccatgccctgtcccctactccctctcccgtcccctccccctcccgtcccctccccccacccccccgcccccgccccacacactcttttccacccagggcttccctcagccctcctgtcgcgcttcactggctgccccatccgccctcacctagccacttctaaaccaaccccattccaccttccagccccggccctctaaacctgcctttcccaactctgccgtccagttctgtccttaccaagttgtccctaggctcctctcgggaactgcgcggccatcgcctggccccaccccattccctggatctccccccacttacctggccgcccccagtcccctttctacctggtcgcctcatctggtcgcctccgagcccctcccttccttccgcccactgcacctggcggcctgtgctcggctctccagctccgccctcaactggtcgcttccggccccgcgccacccaccaaaccccctcctcacctggctgcccccggggccctccgccgggctcctgcgctgactgcgctgccgccgcagggagacactgtacaccgcgccgtcctcggtctcttcaccccagtcctgcagcggtgcctggacgcacaggcggactcagggcaccaaaggggcacaggtcctggggcctcagcctccttggccgctcggactcgggccgagtcctcctgctgcatccccacgccccttcccggccagaagctgcgagactagggctggggtcccaggctagtcccctcctcgctgcgggtcccctcctcccaggtcctgaggacatggggtggcatttggggatgtcccagggcccagtctaatagaacctgtctctagctctttctgccgactgcgctcagagactcgcgcccccatccctaagaggaaccagtcgcttcactgggtcaagggccgcgagtccccaggaggggactccagggcaagttcagattgggagcagataccgtccgacgggcgggcgcttggagtttctggacctgcgggtcaccagggatgcggggtccggggatcccttgtccccttaccagggccagctctttgcctgctgtgcgctccatggccggcgcccgtccctctcagtggcgccgctgagtgaggcggaagggccggcgggtggcgggtggcgggcggcgggcagtggccgggcgctgaggccagaggggcggagcggccgagctgctggggcggggcggggcagggcaggccggacccagcctctgggtgcctccagccggacccagcgccagcccaggagaggtcctggctcttccgctgggtgcctatcaatctgtccccagaagaaaggacatatctgtccccaaggggtcttttttgtatccccagatgtgggggagctcctgtgtgggggcatgtgtgtgtccccagaccagagtcctctgtcctccagtggaaggggctagcttgatcaagtgtgggggcatcttccactttttattattattgctattattttgagatggagtctcgttctgtcacccatgctggagtacagtggcttgatcttaactcactgcaacctccgcctcccagattcaaaggattcttgtgcctcagcctcccaagtagctaggattacaggtgccgccaccatgctcagctaatttttgtattttttgtagaggcggggttttgccatacttgccaggctggtctcaaactcctggcctcaagagattcgcccacctcagcctcccaaaatgctgggattacaggcatgaaccacggcgcccagccttattattttttagagacagggtctcactcctgttgccaaggctgcagtgcagtggcttgatcttggctcactgcaatctccgcctcctgggttcaatccattctcctgcctcagtctcccaagtagctgggactacaggcatatgccaccatgctcagcttttttttttttttttttttttttttttttttttttggtaaaaactggttttcaccatgttgcccaggctagtctggaacccctgggctcaagcgacacacccagctcagcctcccaaagtgctgggaatataggtatgaatgagccactgcaccccgcccttattttatttattgagacagggtctggctctgtggcccaggctggagtgcagtagcacgatcatagctcactgcagcctggagctcctggactcaagtgatcctcccaactcagcctcccaaaatactgggattacaggcataaaaccactacatcgggccatctcccatttttaagctccatctgcgtcactagctgatgggagtcatcatgacccaggttggaggaggcagtctgtggccctgggttttcagggacagccgtctcttgggtggtgcagggtcaaaaacagatgaatacccaggggcatggtcggtaacatttattgcgcaactctgaggccggggcggacccagctggggagatttactgtgggaacgtctggcccggccccttcctcccctccgggcgccgctggccgcctccgttcccggtccgggccgcgttcagcccctgaaggggccccgtggggcctgcgctagacccggagggatcgggggctccgaagggggccgcctggtgggtgtcaggacgagtctaggacctccgagagcgacggtgcttcttgtgactttcgattaatttctgggaacggatcttgagtgatgcgcgggtcactacctcgttgtcctcctcctcactctcttcgtctaaggggggtggggggatgagcagggagcgatgtgggatccaggtccccatccctggctccccttccctttaccaccccactccacccccaccttggccctgaacagggtatctgacaacctcctgctacccagcttggggccccaaccgcaccccttcatccccccacccatactgaccaaaaaacttgtccttggaagtggcaaggggcagggcgatgcgggtgttgtattcgggcagccttccctctaagctggcgaggaactaagcggggatgggaagcgagagaggaaggtgggcggggccaggggccaccgagaagtcacgttccccctcctccctaccccattccgagatatgccctagttccaactggagaccactgcccactcccatccctccttaagcaggcaccttgatacccagcttcaccccctcatcactcaggtccgcccctggtctctggggccctgccactaggcctctccccatccggataccccagccgcgtcctctagcctcacaggacccgcctgcacctcttctggtttcttccctcgtggctcgggctcacccctggctcgtcaaacctcgcccgttgtccccgagaccccttcctggctgatcagcctgcaatctggtctcccgaagttgcccccggttccctggttttccgacccagccctactcctagatctctggagctctgccccatggctgcagggcacctcgcggttagcgatgtggcacagcatctcctgcacgtcgtggccctggagctgcgcctgcagtttcagcagcttttcctccacgaggcccagcaggtttggcacatagttatctgcctggggatccagctcctttcccgcgaagcggccgtcctcctgcggccagggtagagccgggtcagccgagaggggtggggcctcttggaaggctccacccaggggcggggcttttctttcgggggcggggcctaggaggtaagggcccacctgcagggtcgatcctagccattgggggcggggacttaggtcaaggccacgtctgtgatgggggagcctctgaactctaactctatatgtaaaggtttcggggaggcctcttgggaacagtaaggattcgagggaggccattgtgggatggcctcctgaagaaatggccctctgctgcgggcaggataggtcttctgtctcgggctgctccagaactgcagataggtctccgagcttttcggggacagggtgggacttctttcccttggaggcggagcttgagacgggacagggtctctgacgtcttgggcttccttggggagtgagagcttccccagggaggtggggcggggactctgaggaatggggtggggcttcccctgtgggcggggcctctgacgtccgggacagaggatgtggcaggccacgttccctcgggcaagctggtgtggcaggaaccccgcttcgtggctgcgcctctgcggtcccaggagggcctgtcggggcttcccctgggcggggcctaccacagtgatgtggatcagcttgctggccaggtgctccaggctgtccttggccacttgcatcgcccgcaaggcgcgctccagctggtccttggcctcggcgtgccgccgctcctccttcttgagacgctcctgcgcctcggcttgcagtttctgctggctgcagggagccgggaggtcaccccgggggctcagcccgccccgccgccctccccagagccccggtgcctcacctcaccagcgtggcctcccccgagtacttgaggtcttccagctcccgctgcagttgttgcttctcctgcttcagcctcaccaacgtctgctcgttctcgctcttgagcgtctccaactgcgcgaaggtgtcgccctgggccaggaaccgccgcaccaacgactgcgggccacccagccccagtcagagccagggcctagggagcgtaggggcgctccacctcctctcccccaccctgcgaaccctcgcacgcaggacaggtggcctgagctggcgccttttgcacagcaatgtatggggacactgtgggttggacgcagggttgcttcaagggtgagcagccctggatatatcatttttgcggggccctttctggcctatataaggaatttgagtcagcccaaactcgggggcaactggagaggcgagcatagcttctttccaaaatcaaagtgccatcaatttctggccgtgaatctcgcccgattccgcaggaaataccgcccgtcttcggagccatccgctcacaaggcccacatctggaaaggggctgcgcctcagtgccccagatgaccccataggtgtactcctataggtgggagtcccggaagtcatcaggggtcggccccatcggaggagcagcaggttggcggacacccagaggggagaaacagggttggggtccagtgttcaccggcgggaaccaggacccaagggggacacagcggtcttagaataatgcaaggaagactttacagtgagggacccggcgcagggaccccacttgccaggatctgaggatggtactgggcggtccactgggtcccagaccatgttacagacactggagacagaacaagagacgaaactcccagttctcctagagctggcatggcaaaggagttagcatggtgcaagagagaacggaaggcgagtgtagaaatgacggcgagtgtagacagctcctaggggttttgctgcgaagggcagcagaaaaactgaacggtagctggagggggaagggatgtttttcaagaaaggagcaggtttgtgagctgaataaccgacctggcagagaggggagacagggtgtgtcggtttcaccggcttaggcacccctggggcccgtctggggtggggggggggcgcggcggagagggctgcgggcagaactcacgtgcgtctcgtcagtgccagtggcgtccttgaccttgccaaagatcacctccatctggtacatgctccagcgctgccgcagctcctcctccttggcatgcaggctgtcctggatggtgtcgtcggactgtagcagcaggtgctcgcggtgggtctgctcgtgggttgaggtcagagccagggtcagctggtggacagcgcttgggaaggaggccggggagggggatccagataggggcccgcgaggaacagggctcaaactggagggaagggagagggcaaaagcttggggccagataaaggcacccgggcaggtgtcaagaaagtgggacaaggtcgggcgcgggggcggtggctgtggctcacgcctttaattccagtactttaggaggctgaggcgggaggattgtttgagcccaggggttcgggaccagcttggacaacacggcgagaccccgtctctacaaaaaacaccaaaattagcagggcgtggtggggcgcctgaagtcccagctacttgggaggctgaggtgagaggatcacttgagcccaggaggtcgagactgcagtgagctataattagtctgagcgacagagaccgtgtctcaaaaaaaaatccatatatatatgtatatatgtatatatatgtatatatgtatatatgtgtatatatacctatgtgtatatatgtatatatgtgtatatatacctatgtgtataaatatatatgtgtatatatacctatgtgtatatatgtatatatgtgtatatatacctatgtgtatatatgtatatatgtgtatatatacctatgtgtatatatgtatatatgtgtatatatacctatgtgtatatatgtatatatgtgtatatatacctatgtgtatatatgtatatatgtgtatatatacctatgtgtatatatgtatatatgtgtatatatacctatgtgtatatatgtatatatgtgtatatatacctatgtgtatatatgtatatatgtgtatatatacctatgtgtatatatgtatatatgtgtatatgtacctatgtgtatatatgtatatatgtgtatatgtacatatgtgtatatatgtatatatgtgtatatgtacatatgtgtatatgtatatatgtgtatatatacatatgtgcatatatacatatgtgtatatatgtgtatatgtgtatatatgtatatgtgtatatgtacatatgtgtatatatgtatatatgtgtatatgtacatatgtgtatatgtgtatatgtacatatgtatatatacatatgtgtatatgtacatatgtgtatatatacatatgtgtatgtgtacatatgtgtatatatgtgtgtatatgtacatatgtgtatatatgtatatgtacatatgtgtatatgtgtgtatatgtacatatgtgtatatatgtgtatgtgtacatatgtgtatatgtacatatgtgtatatatgtatatatgtgtatatgtacatatgtgtatatatgtgtgtatgtacatatgtgtatatgtatatatacatatatgtgtatatacacatatgtgtatatgtatatatacatatatgtgtgtgtatatatgtatatatgtgtgtatatatgtatatatgtatatatgtgtgtatatatgtatatatgtatatatgtgtgtatgtatgtatatatgtatatatgtgtgtatgtatgtatatatgtatgtatatgtgtatatatgtgtgtgtatatatgcatatatgcatatatgtatatatatgtatatacgtatatatatatatatatatgcaaaaaaaacctatcaaacaacaactacaacaacaacaacccaaaaaacaaaaaggcaggacagggctttggtgagggctggatgggaggcagcctcagggcaggtgcaggggcggggccaagagtgagggggcagggccttaggcaacggttggctcagaggcacggtcagattcaggacaggcagtctagtcaggtgggaaaggatgggtaggggggtcactgagtaaggggaaggctggaggccatgtcagagccaaaatggtgcagtcgcttaggaggggaggggaggagaggcggggtcagggatgtgggaggggtcttcgcaccaagtgggggtggagtcagagagggggcggggttaggagaaacagaaaatgggagaaggcctaggatgagggagagccagggcatggctggtttgtgctgggctgggctggagtcacaggcgcgcacccctgggtgcgcccaccttgcgctccatgcgctcgttctccagtttcttctcctcggcgcgcttcttgcactcacttatgtagcgttcccgcttcttgcgctctcgaaccaaggtctcctctaggtactgcagctggttctggagggcgggcagggtagcagggagaccagctggcacctaccactgcccgccgcagggtgctgggagatagatgggggcgggggcgtaggggaagctcagggacagctgaggtcagattctcaagctgggagaccgcggcagctgggcaggatggccgagggcaagaggggtggcaccttggcaatgtcccgggcattgagggcctcttggttcaccacgtgcagtgcctccagctcatgtttggtcctcaccacctcagcctccatggagtccagccggttctccaagttgaggctctcgtcctggggcgtggtggggaggggtagcggagatggtgcaggtctgtgactgctgtccctagccaagcccgccctccctgtttgtcatctcacccgagccctcctagtccctaccattagataggccttgagctgcaggtacacgctggtaatgtgctcggcctcctgcgccttcatctgggccttctccaggcggttctccaggttccgcatggtctggagagcagcagggctgggctgagggccctccgcactcaatccctcccacacgaccctctgccctgcaggcctcacccgcccctaccttggccacctccgtgtgtctgttttgcgcctccgccatctccagaaggcgcaggctgtgctgcagctggagctcctccagccgcctctgccgcaacaccacctggtgccgcagggcgttctgctgcttcaccttctccctcagccggtggtctaggtgctccagggcctgccgcaaggaggggagcgaaagcaggagcctcaacaccctaccccgacacacacctagcccttcctcccttccttctcccacactgtggcttccaggactcccctctcccgttttctacccacctccctggccaccccttctgtgttgtttttgtagagagagcaccggagtcttctctctgtctatatcgaccaccttggcgatcttacaccggctcagggttctaaaaaaatatttttaaatttttctttctttcgtttttttttttttagacggagtcttgctctgacacccaggctggagtgctgtggtgcaatctcggctcactgcaacctcctcctcctgggttcacgccattctcctgcctcaacctcccgagtagctgggattacaggtgcccaccaccacgcctggctaatttttgtttttgttttcttttcttttttttttttttttgaaacggagtctcgctctgtcgcccaggctgaagtgtagtggcacgatctcggctcactgcaacttccatctcctaggttcaagcaattctcctgcctcagcctcccaagtagctgggattacaggcatgtgccactacacccggctaatttttgtattttgggtagagacagggtttcaccacgttgaccaggctggtctcaaacgcctgacttcaggtgatccacctgcctcggcctccgaaagtgctgggattacagacgtgagccacctcacccagctatcttctggccatttttttcttttaaaaaatgttttaggctgggcgcggtggctcccgcctgtaatcccagcactttgggaggccaaggcgggtggatcacgaggtcaggacatcgagaccatcctggctaacacggtaaaaccccgtctctactaaaaatacaaaaaattagccgggcatggtggcaggcgcctgtagtcccagctactcaggaggctgaggcagaagaatggcgagaacccgggaggcggagcttgcagtgagccaagatcgtgccactgcactccatactgggcgacagtgcgagactctgtctcaaaaaaaaaaaaaaattatagaggcagggtctcgctatgtggctcaggctggtcgcgaattcctgggcccaagccatcctccttcctcggcctcccaaagtgctgagattacaggcaagagccactgcacccagcccagttttgttttgttttgttttttgagatggggtctcaccctgtcactcaggctggagtgcagtggctcgatcttggctcactgcaacctccgccccttgagctcaagtgatccttcctcctcagcgtcctcagttgctgggaccacagatgcatgccacgacgcctgggtacgtttttgtatttttggtagagacagggtttcatcatgttgcccaggctggtcatgaacttctgagctcaagtgatccacctgccttggcctcccaaagtactaggattacagacgtgagccatcacgcccagccttttaatttttataattattttttcagacaaggccttgctttgtcacccggacgggagtgcagtggcacgaacatgactcactgcagcctcgacctccccagttcaggtgatcctcccacctcagcctggcaagtagctgggactacaatcctgtgccaccacatttggcaaatcttctgtatttgttgtagagtcaaagtttcactatgttggcaggctggtctcaaactcttgggctcaagtgatcctccagccttggcctcccaaagtgctggtattacaaggcatgagccaccatgcctagactgtgttttattttttatttatttatttatttatttatttatttatttatttattttgagacagagttgcccaggctggagtgcaatggcatgatctcggctcacagcaacctccacctcccgggttcaagggattctcctgcgtcagcctcctgagtagctgggattacaagcatgcaccaccatgcccggctaattttttgtatttttagtagagacggggtttcgccatgttggccaggctggtctcaaacgcccgacctcaggtgatccgcccgcctcagcctcccaaagtgctgggattacaggcgtgagccaccgcgcccggcctttaattttttatcttttgtttttgtttgtttgtttgtttttgtttttttgagacagagtctcgctctgtcacccaggttggagtgcagtggcaccagtctcagctcactgcaagctccgcctcccgggttcaaactgttctcctgcctcagactcctgagtagctgggactacaggcgcccaccaccatgcctggctaattttttgtatttttatttttattttattttttatttatgtatttatttttgagacagagtctcactctgtcgcccagactggagtgcagtggtgcgatctcagctcactgcaacttctgcctcttgggttcaagcaattctgtgcctcagcctcctgagtagctgggattacaggtgcctgccaccacacctggctaatttttgtatttttagtaaaaacagggtttcaccatcttggccaggctggtctagaactcctgaccttgtgatccacccacctcggcctcccaaagtgctgggattacaggcatgagccaccgcgcccggccttttgtatttttagtagagacggggtttcaccgtgttagccaggatgggctcgatctcctgacctcgtgatccacccgcctcggtttcccaaagtgctgggattacgggcgtgagccaccgcgcccagccttttttttttttttttttaaagaaacaggttgtactgtcactcaggctggagtgcagtggtgcaattgtggctcattatagtctcaaacttctaggctcatgcaatcctccagcctcagcctcctgaatagctgggattacaggcatgtgccactggtcattgttttcgtttgtttgttttgagactgagtctcactctgtctcccaggctggagcacagtggcacaacctcagcttactacaacctctgcctcttgggttcaatgacttttaaaatgttttattttttttaattatttttattttatttattttttgagacggagtttcgctcttgttgcccaggctggagtgtaatggcacaatctcggctcactgcaacctctgcctcccgggttcaagcgattctcctgcctcagcctcccgagtagctgggattacaggcacgtgccatcatgcccagctaagttttgtatttttagtagagacagggtttctccatgttggtcaggttggtcttgaactcccgacttcaggtcatctgcccgccttggcctcccaaagtgctgtgattacagacgtgggccaccgcgcctggctgtgatgtttttttttttaacttgttttccctattaggatatgagctgtttttagaagtggagacttggtctgctttttcactgcatttactaccatgccaggatgccagatacaaggaaagtgagtaataaagatttaattgaatgagcacatgaatggcagctagtgtgcaggaaggattggagagggtgagcctggagtccagtggtgaggggacccaggctggaaatgaaggaggaggtggggcgagggtgggcaaacctgtcctgtcctgttcttcaggtatggcttctcccacttccattcgcgaatcactgcctggaccactttctcatctccctgcaaggagggaagtccagtcacctttcagcatgccacctccagctaaggccaggtgctacctacttgtcccccaccatccaccgccacgggaaccctacacccacccctttgccccttaccttgagcaggtccagcagctttagttccagtgccttagtctccttgcggagctgactgatggtctcctggttcttcttgatgttccactgagagctctcaaaaaaagccttccggtcaccctctggcaggcaggtgaggtggacagacacacagttactgggtgggtgcatgggtgcaacatcccagaggaaagaccttttttgcaatcatcaactttttttttttttttgagatggagtttcactcttgttgcccaggctgcagtgcaatggtgcaatctcggctcaccacagcctccgcctcccgggttcaagagattctcctgcttcagcctcccaagtagctgggattacaggcatgtaccaccacacctggctaattttgtatttttagtagacatggggtttctccatgttggtcaggctggtctcgaactcctgacctcaggtgttcccaaagttctaggccccctaaagtcctaggattataggtgtgagccactgtgccaggctcatcaacttaatattataagaatgcagtcgttgaccagcctggccaacatggtaaaaccgcatctctactaaaaatacaaaaattagccaggtgtgaggctgagcatgatggctcgttcctgtaatccttgcactttgggaggtagaggcgggcggatcacctgaggtcaagagttcaagatcagcctggccaacatggtgaaaccccatctctacaaaaatacaaaaattagctgggcatggccgggcacggtggctcacgtccataatcccagcactttgggaggccaaagtgagcggatcacgaggtcaggagatcgagaccatcctggctaacatagtgaaatcccgcctctactaaaaatacaaaaaaaaaaaaaaattagccgtgcatggtggcaggcacctgtagtcccagctactcaggggactgaggcaggagaatggtgtgaacctgggaggcagagcttgcagtgagccgagatcgcaccactgcactccagcctgggtgacagagcgagactctgcctcaaaaaaaaaaaaaaaaaaaaattagccgggcatgatggtgggtgcctgtaatcccagctacaggaggctgaggcacaataattacttgacctctggaggtggaggttgcattgagctgagatcctgccactgcactccagcctgggcaacagagcaagactctgtctcaaaaaacaaaacaaaacaaaacaaaaaaccccaaaatccttccatactcaagtcccacagtcagccctgtggaacctgcagatacaaacagttgtccctctgtatactcaggttttgcattccaggactgttgtattttcttttcttttcttttttgggactgggtcttgctctgtcacccagaatgaagtgcagtggtgctatcactgctcactgaagcctcaacctcctgagctcaagcagtcctcctgcctcagcctcccaagtagctaggactagaggcatgtgccaccacatctggctactttattttttgtagagtcaaggatctcactatgttgcccaggctggtctcgaactcctggcctctagcaatcctcctgcctcagcctcccaaagtgctgggattacaggtatgaaccactgtgcccggcctgcccatctcaattttttttaacttgaaaggatgaatgatatatgtgaacacatggtgttcaacggtcaactgtacttcactgtgagcatttattatgtgttggatgctggactaagaggtttccgaatgccatatatcacgtgccaataggtatccatggcatacgcatatcataccccttgcacagatgacaagacagaggcttgggctgattaaactgcttaaggtcacaagcaaccatgcaagattacccttttttttttttaagacggaatctcactctgtcacccaggctggagtgcagtggcgcaatcctggctcaccgcaacctccacctcctgggttcaagcccctctcctgcctcagccttccaagtagctgggattacaggcgtgcgccaccatgcccggctaatttttgtacttttagtagagatggggtttcactatgttggccaggctggtctcaaactcctgacctcaaatgatccgcccacctcagcctcccaaagtgctgggattacaggtgtgagccacctcgcccagccatgattacctcttaataatatcaacaaaagcaataataatagcttacacacaaggattctgcaacctcaggatgaccaacaactgggccgaataattatttgccgtggggtgctctcctgtgttttgcagaatgttgggcagcatcttcaactctgcccactagatgccagtggcagacacacacccacaacagacatccatgccaccatgcccggctaattttttgtatttttagtagagacagcgtttcaccgtgttggccatgctggtctcaatgtcttaggacattgccaaatggcccctgtggggcaaaccaacccttttccaacaagaaccactggtttacaccttatggtactttgctatgtgccaggcactgttctaagcactttacacatttcaggtacctatgttgtactgttactatccccatttcacacatcgagaaactgagaacaattaggttactcttagtcccccaaggttggacaactattatgcagagccaggattccaacccagaaaatctggctctaaaaatctatgctcaggccaggtgcagcggcccatgcctgtaaccccagcactttgggaggctgaggaggaaggattgcttgagcccaggagtttgagaccagcctgggcagcatagtgagaccccatctctacaaaaagtaagaaaattagccaagcacagtggtgtatgcctgtagtcccagctactcaggaggctgaggtggaaggatcgcttgagcctaggaggtcaagtctgcagtgaactgttatccaaccactacactccagcctcaacagcagagcaagaccctgtcagaaagaaagaaggctgggcgcggtggctcacacatgtaatcccagcactttgggagccaaggccgtggatcacttgagatcaggagttcgagaccagcctggccaacatggtgaaacccagtctctactaaaaatataaaaattaggtgtggtggcacgcacctatagtcccagctagtcaggaggctgaggctcgagaatcgcttgaaccttggaggcagaggttgcagtgagccgagatcatgccactgctctccagcctaggcgacagagcaagaccctgtctcaaaaaacaaaaaacaaaacaaaaaaaaacgcgggtgcagtggctcacgcctgtaatcccagcagtttgggaggccgaggcgggctcacgcctgtaatcccagcagtttgggaggtcaagagattgagaccaccctggccaatatggtgaaatccctctgtactaaaaatacaaaaattagttaggcgtggtggcgtgtgcctgtagtcccagctactcaagaggctgaggcaggagaatcgcttgaacccgggaggcggaggttgcagtgagccgaaatcgttccactgcactcccacctggcaacagagtgagattctgccaaaaaaaaaaaaaaaaatagagaaaataaattacaagaaagtatgaagtacagttcagtcggttctgaacccatgagaagttttaagagacagagaaggaaaaacatgaactaagtatgagtttttgcccagaaacggtttacctagactcatgctggagaaatacctttgtcacaccatgaagattggatgggcactgttgacccctgaccctctgtaccctctggagccatcttacctaacagttgtatctttttatgtaactcagccacctgagagtgcacagagggcttccctgcacctctgtggaaggatcctcccttggaacggcctggggtccacgcctgggctgtgcccttgcctcggaggtggctgggtttgcccgaagcctccctgcccttgaccctggaagagggcgtcgaagcctggtcctgaggaggcagggcgttggcggaggccgccctgcacagaggagatgtcatgatggggttggggctgaaggcccctaggggttagggggataactaggagtcagtcgcccctgtcagggatccgtcagctcggattcctagggctctgaaaaatgcactttccgaccgctaggtggttgcgctccgcatctctcggttgccaggtaaccgcctccccgtctctctccactgtttccatggagatcacccgcgttccgtggctgacactgcgttctcattggctgaggctgcatagaggggcggtcccaacagtgggcggggtagagccgcgccgcaggacggagggtctggacactttggggtcacgtgctcattccgtttccctacctcccccaaccttatcccgcccctgggggttcgcgggcatttttcaggaactttctttccggcttgagaagccgccactcccaagatggaggtacgctgcgccgccattaagagctagccctcagaactatcctctctaaggtttcacagtcctgcccaagatggccgtctcggctctggcaccgcccccactcctgcctctcccaacatggcgaccctgagtctccgttcccggtgcggaacgtacgaccggaagtgacggggtccagaaatttccgctttctttctgcagcaggaaccgcggctgctggacaagaggggtgcggtggatactgacctttgctccggcctcgtgtaggtgtgaacgagcgggtgggagggcacctcagtttcttacagggggcaaccggagggtgcatgtgtgggtgtggacggcggaggctgttaatccctttggtctgttggcgggaattgggtcacaattgggcacagggagcggaggttttgagatcttgagatcctcgccattgatttgagcaaagtgagactggccaggattggggagatcgctgcccctcgcccccatatcggaaacaaagtgaggcctcattgcctggaagcgatggaggaatccaattggctggaagtagccctctcccactgaccgggatccgctttcttcctgcagcgtgaagacacagcgcatctccccgctgtaggcttcctcccacagaacccgtttcgggcctcagagcgtctggtgagatgctgttgccgctgctgctgctgctacccatgtgctgggccgtggaggtcaagaggccccggggcgtctccctcaccagtgagtcctcctgttcaccctcccgccaggctggaggtgggaggggccaacattgggccttagggataggcatttacagccttttgactcagtttcccggtagtgctccgctggtggggatgggaggacagaggtggtatttggtggagaaggcgcttacctgccctgggctgagcttcctgtaccccgcagatcatcacttctacgatgagtccaagcctttcacctgcctggacggttcggccaccatcccatttgatcaggtcaacgatgactattgcgactgcaaagatggctctgacgagccaggtgagccttttctctgttcatccatcagatgtttattgaacactgctcagtgccaggccctgtctgtgtgaccaagatactacctctgctggctcccctttgagtgggcagaaacaagctcagaagtcagtggtcagtgttatggccccgggcagctggaggagcccagagtcgtcctcctcccaagcctcggggtcagagaaggctcctccaaggaggtgaggtttcagttgaatcccgaaggtgctgcagatggaggggtcaacacgggcaaacccctagaagtgggagacagggtggggccaagagcaatccagcaggagacagaggtgaagggagaccctggctttttgtttttgtgtgttttgaagagacagggtcttgctttgttgctgaggctggagtacagtggcatgatcgtagctcactgcagcctggaactcttgggctcaagtcatcctcctgccttggcctcccaaagtgctggggttacaggtgtgagccaccgtgcctggatgagaccgtgtctttggttttgtttttgttttgagacggagtcttgctctgtttcccaggctggagtgcagtggcgccatctcggctcactgcaagctccgcctcccgggttcacaccgttctcctgcctcagcctcctgagtagctgggactacaggcacccaccaccacgcccagctagtttttttttgtatttttagtagatacagggtttcactgtgttagccaggatggtctcgatctcgtcaccttgtgatccacccgcctcggcctcccaaagtgttgggattacaggcgtgagccaccgtacctggccttgttttgttttgtttttaatttttttttttgagatggagtttcactcttatcgcccaggctggagtgcagtggcatgatcttggctcactgcagtctccacctcccgggttcaagcgattctcctgcctcagcctcctgagtagctgggattacaggcacatgccaccacatccggctaatttttcgtatttttagtagagatggagtttcatcgtgttggccaggctggtctcaaactcatcacctcaggtgacccacccgcctcggcctcccaaagtgctgggattacaggtgtgagcccccgtgccaggtggagaccctgttttgaagggcctcagtgagaagaggcaggaggcggcactggagagctttatttcgagccctggctgtgcagtgtacaactctttccttcctttggtttcctttcctttcttgtgctgtgtgcagtgtgggtcaggggctcttatctgtggatggatgggacatgtctgtccctgagctgactccgaaaaccttccctcccttcttcctcacaggcacggctgcctgtcctaatggcagcttccactgcaccaacactggctataagcccctgtatatcccctccaaccgggtcaacgatggtgtttgtggtaagtgaagatgcaccaggattctggaaaggtggtagagggagggagggaggaggcactgccaggtctgatcttggcttctgcctctgccacagactgctgcgatggaacagacgagtacaacagcggcgtcatctgtgagaacacctgcaagtacgtgggtgacagtacccctcccatcaccccaccccaagactttgcctggctccacccagtgaatcgggcccactctctcttctgcttttctgtatcgggttctctgtctgtgccaggtgccttgtgaatcctaatccccacctttccctctagtctggaagcaggtaggattgtttcccgattcaacagatgggggaactcaagtttagaaagggaaatgacttccccagggtcacataggagatagcagagccggcacttggactctaaactttccattgtcacgctctgcagcaggtcctgaaaaccgaaacacccacaggcaggtaaagtatacaacggaaggaggccaggcgcggtggctcacacctgtaatcccagcactttgggaggctgaggcaggcggatcacgaggtcaggagatcgagaccatcctggctgacatggtgaaactccgtctcactaaaaatacaaaaaattagctgggtgtggtggcgggcgcctgtagtcccagctactcggtgggctgaggcaggtgagtggcgtgaacacgggaggcagaggttgcagtgagccgagatcgcaccactgcaatccagcctgggcaacagagtgagactccgtctcaaaaaaaaagcaaaaaaaaaaaaagcatacaacagaaggaggccaagtatgaggcaatacggaggggtggggattgtggcatctaggggaacagctgttctcaattcctgccagctgatccttttgtagttcataggcatgatgatttatttttatttatttatattttttgagacagggtctcactctgtcgcccaggctggagtgcagtggcgtgatcttggctcactgcaacctctgcccttcgggttcaagcaattctcacacctcagcctcccaagtagctgggaatacaggcgtacccccaccacgcctggctaacttttgtatttttggtagagatggtttcactatgttggccaggctggcctcgaacgcctgacctcaggtgatctgctcgcctcagcctcccaaagtgctaagccgccgcgcttggccacgatgattaggtttttatgcacgtgtgagagatacgcctcccttaaaccttgttgcgaccttggcgcattacctgtctgatatgaaaaaataagacccggctcatggtggctcctgcctgtaatcccagcattttgggaggctgaggcaggaagactgcttgagcccaggagtttgagaccagcctgggcaaaatagcgataccctatctctataaaaagtaaaaaaaaaaaattaaaaagtaaaaataaaaattggaaattataatttaaaaaattactggttgggcatgtggctcacacctgtaatcccagcactttgggaggctaaggcgagaggatcaccttaacccaggagtttgagaccagcctgggcaacacagtgagacccgtctcagaaaaatttttcttttctttttttttttttttttttttttttttgtgagacagagtctcactctgttgcccaggctggatggagtgcagtggcgcgatctcggctcactctaacctctgcctcccgggttcaagcgattcttctgccttagcctcctgagtagctgggactacaggcatccaccaccacacccggctaaaatttgtatttttagtagagacggtgtttcacaatattggccaggctggtctcgaactcctgacctcatgatccacctgccttggcctcccaaagtgcggggattacagatgtgagccaccatgcccggctgaaaatttgttaaaaaattagccgggtgtgttggtgcgtgtctgtagtcgcaggtactcaggaggctgaggcaggaagattgcttgggcctgggaagcagaggttgcagtgagctaaaaagtaaaaaaaaaacaaaaaaaacacaaagtcctatcagttgttggcagatggtgtaaaactctctggattccacatcttttaaatagaaggtggattgaacacaaccaacacacttctttttttttttgagacggagtctcactctgtcgcccaggctggagtgcagtggtgtgatctccgctcactgcaagctccgcttcccgagttcatgccattctcctgcctcagcctcccgagtagctgggactacaggcacctgccgctacacctggctaatttttttttttgtatttttagtagagatggggtttcaccgtgttagcccggatggtctcgatctcctgaccttgtgatctgcccgcctcggtctcccaaagtgctgggattacaggtgtgagccaccgcccctggcccacacttttttttgagttagagtctcgctctgttgcccaggctggagtgcagtggcatgatctttgcttaccccaacctccacatccgggttcaagtgattctcttgcctcagcctcccgtgtagctgggattacaccgtgtagctgggcgccaccacgcccagctaatttttgcattttcagtagagacagggtttcaccatcttggccaggctggtctcgaactcctgacctcaggtgatccgcccgccttggcctcccaaagtgctgggattacaggcatgagccaccacgcccagccaaccaacacacttagtaaccagattgtctttttgtctgggagtcatgatttctgttctgtcttctgtggtttttttatttgttttaattatgtgtaaagacagggtctttatatgttgcccaggctggttgcgaactcctgggctcaagtgatcctcctgccttggcctttcaaactgctgggattacaggcatgaaccactgcacccagctgatctcctgtctcttgagagttgatatctagctccacctcctggcactccctagtcccttccctgaccccaggggcttacagaacccactgttcctctttcaaggacaggaatgaaggatgctgatgttgagagaacctgggaggaaggcttgctctcatctttcccagcatggcttggtggggggccacagctggattgagctattttggaagaggcagacctggtggatcctaagtgccccactggtggtgcctgtgtgtctccgcaccgcagagagaagggccgtaaggagagagagtccctgcagcagatggccgaggtcacccgcgaagggttccgtctgaagaagatccttattgaggactggaagaaggcacgggaggagaagcaggtaaggaacccgcgggggctgccccagggtgatctgggccttgaggcctcatagtgtgggcttgcaaggctggggaggggtttgcccctgactgctgttctggggcaagtgactgcctttcggagctttgctttctcagttgtgtgctaggcgtttagtcattggctaagtataatagttcccgagggggaggctgtcagcttaggtgtttatcagggcctcgggcatcagactaaagcaggctggaagggcctctctgcctcctggggatgggagggttgcttctctgtaccccggatctgtggtgccattgcctgtaagatgggctgatgaccagatgactccccagttctgatgttagaaagataacgtcagccagtagcagctggattaattccatagggtgggtgctttggggtccctaggtgtgtgtctctccctgccttgcctgtgtactgggcaggaggctggaaaccgacctggatttgcctcaaggcattcattgctagtgggagggacagccagccagggctgctggacaaagggaaattcggggtagagacttcttgcccagttcctctccctctctgccttgggggcaggaggcaaggaaggcttcttggaggaggaggcctctatctcacatgaaatctgttgggtaatttggagttagccaggtagagtgttccaggctgaaggaacagcatgtttgaagaaccggaggcagaagagcgtttaggggtctgaatgttgtcagggcgactggatcctagtaagatagggatggggcaaatggggctggagaatcaggcaggggcctgattacctgggcccttgcgggctacattgaggcgtttgggcttctctccagagggctacagggaaccccagctcgggagagagacccagcttggtgtgtgttttggaacatctccctgctgccctgtggagtagaggcagggaggtagtagtcaatgaggaggaggcagaacagaggagagctggtctcttgccttctgcccacccagaaaaagctcattgagctacaggctgggaagaagtctctggaagaccaggtggagatgctgcggacagtgaaggaggaagctgagaagccagagagagaggccaaagagcagcaccagaagctgtgggaaggtatggcagaaatggccaaggactcaccttcagtcctgggtgggagcaggtctgggcctaggagtctcccgctcattatctgttgtcagtttcagcaggtttttgatcatgctgcccatcgccttgtgtgctttgaggttcgcttggattgtggcatatgtcaggagcctcctttttaaaaattgtttaaataatttgttttttgaaacagcgtctccctctgccacccgggctggagtacagtggcgtgatctcagctcactgcaacctctgcctcccaggttcaagcaattcttgtgcctcagcctcctgagtagctgagattacaggcacctgccaccacatttaactaattgttttgtatttttagtagagacggggtttcacaatgttggccaggctggtcctgaactcctgacctcaagtgatccacctgccttggccccccagagtgctgggattacaggcatgagccacctcgcccggccgcctacttccttttaacatcaatgtagattttgttatatgactttagcaggacttagttaatccagtgaccatttttcctatcaggtgtttggtatttgtcttcactaattgtaagagcttttttgtggctgggcatggtggctcacgcctgtaatcccagcagtttgggaggccgagacgggcagatcacctgaggtcaggagttcgagaccaccctggccaacatggtgaaacgccatctctactaaaagaaaaaattatggccgggcacagtggctcatgcctgtaatcccagcactttgggaggctgaggcaggcagatcacgaggtcaggagattgagaccatcttagccaacatggtgaaacccatctctactaaaaatacaaaaatcagctggacatggtggtgtgtgcctgtaatcccagctactcgggaggctaaggcaggagaattgcttgaaccaggaagttggaggttttcagtgagctgagattgcgcccctatattccagcctggcaacagagtgagactccgtctcaaaaaaaaaaaaaaaattagcctggcatggtggcatctgcctgtggtcccagctacttgggaggctgaggcaggagaatcgctggaacccgggagacagaggttgcagtgagctgagatctcgccactgcactccagcctgggtgacaaagcaatacttcatctaaaaaaaataataaagagctttttctatctggggtttggccctttgtctgcaactgaagatttttttttagtttatttatttttgagatggagtctcactctgtcgcctaggctgaagtgccaatggcccgatctctgctcactgcaacctctacctcctgggttcaagtgattctcctgcctaggcttcctgagtagctgggattacaggcacctgccaccacagccggctaatttttgtagttttagtagagacggggtttcaccgtgttggccaggctggtcttgaactcctgacctcaggtggcctgctttggcctcccaacgtgttgggattacaggcatgagccacggtgcccagctctgtctgcaactgaagatattatttcccttcttcatttgtttttggtgctagagcctggtgttttttggtaaggccacattgcatgtagaaagggaattcactgtctggctctgtctgcccctgaatctttgtcgtgttgcaagcttcctttcacttgggtctgggcaagctcaggcctgattttcctcaggatgtgttctcagtgtggagctgtggaatcagagggaagcgccatgttttgacccagattcccaaagggtggcggggctgagccagggctccgagggtagatggcctggattgggccccaggctacacctctcactggctaggtgattatgggcaggtcccttcacccacagaaaggtcagggacccctcaggccctcatctgtgagactcagaacagtgtcagccgggtctcctgggacatgcgggatgtcctggggtgacctaagactctctagaggaaataccagctgtttttattctgtttgtagaggaccaagctggagcttggtatacagtgggaactgaatcctggtatacagtaggaagttaatcattggagccgctgttgtggctgctttccgctctgcttaggttagagtagcgacagacaaaggagggacttttgggacagaggctcggtccccttctgtccggctggcccctcttcctgggagcagccctggggacccccaagatgcccccaggaccggtctccctccctgtatcctccccatctcccagcatccttggccatgaagtctcattcctgccagccctgccccgacatgcctctgccaggtcctaaacctaaagtctcagtggtcgctctcctctccccaaccccacctcccacctctgaccgtctgcgcactccatctgcgtctccccagaatctgcctctgctccgtgcttcttcctcagtccccagcctgggccagcccttgttatcacctggcttctgccctcgcccccacctctgtcccaacagtggcctgacagggctgccctctgccacctgggttcccacctccctgctccagccccaccagtggccctcctgcctctgcactccccaccttgtcccggtctcccccaacacaaccaggcttcaaccattcaccttgctcttcgtctgttctcccctggtaagggcagggacctttgtctcctccacagtcgtgtcctcagggtccagcatggggccaggcatatagtaggcgcttggtggcaaacgaccctgtggggtgcgggggctgatgggagccggtgggtgggcagggggtgacagaggtggcttctttacagagcagctggctgctgccaaggcccaacaggagcaggagctggcggctgatgccttcaaggagctggatgatgacatggacgggacgtgagtgtcccctagttggagctgcccacctttccgtgggcctgggtttccctccccgccaccctcgcctctagaaaccagccagatcctccttgggttcccccggcgtggggtccaggctgatcccaagccccgtgtgaccccgcctcttactcgtggatggccaggtccaggatgccctgggcgaggagatagggggaccaccctctccccaggagctgggcacagaccctcagcctcagggagtgtgtctaggcatctagtgatcggatggcttttcccagccccactacgctctggggaaagccagacctgggttcgaatcctggctgtgcctctgagcttgctgggttacctggtggagggtggacttttgggggctgagaggcacacggggagcctaggagatgtcaggtgccaaggagcagggggcttcagagggaccgaatgggcaagggtgggggtgggctttgctgggtgggggaccaaggcagatggcagcttcaatgtgccgggtcctggggtggaaggaggtgccacctgggtgagttggtagagaggtcatcggacatttgggggtccaggtatctcccagtcccaccccttactttgagctcctttggggtcatggagtcctgaggagggggcaggagggtggggaggcccctacaccttgaggtcctgaagcaagttccagggtggggccctgcagggaagaacaggtgggccacatggtgcccccaactgagagccactggggcctcacccctccagtctgcttctgccacgcccccgcagggtctcggtgactgagctgcagactcacccggagctggacacagatggggatggggcgttgtcagaagcggaagctcaggtacccccggctgccccttggttggggacttctagggagcattgccccagggtgacctcagggcacaggagggggaccaaggaaagctccttgctggcctgggatgcctcctctgggtgagctgggatggcagccactcagggccgcttcccgcctggcaggacccgggatggagccaggtcgcgctggagcccgtttccccgcacctgcccccactctacccgctgttgagcacccaatccccttcctcccccacccctgtcctgccctattcccctcctcccccacaccctcgtcccctgtctgtctcctttcctatcctcctccttccccgtggcccctggcttctggcctcccttctctgcccacccctgggtttctccctctccatctgcagcctgggccttggcctctcccttggagggcctggccctctctggtcctgggctctctcttcctccatctgtacgtccgtttgtccatctgcttctctctttctgtctcagtgcccccaaccactccagcccctggtctcctcctcccctcccacgggcctgtgctgccccctcctggccgcagtgcctcactggcgtggccctggcctggtcatcagggcccggggcccagccctcccgtgcctggcaccgcagcccgggtgccggggtggccgagatgggggacacgtggtggcctagatcttgacaccacccccaacacacacaggccctcctcagtggggacacacagacagacgccacctctttctacgaccgcgtctgggccgccatcagggacaagtaccggtccgaggtcagtggaggagaagggaggggacttggtcctcccaccacactgcccccaccccgcctcacaaaggagctgcctctggttctggcacctggccaccctggccagctgggtggccccagcaccccccaccgagaccccccgaccccagctgtcggtcctccctgcaggccccgcaggaggggcagagacaccgaggctgccccttgggctgtggtgtgagcctgagggtgtgggtggaccctgagtccacaacaccgaccgcactgctcacccgccaggcactgcccaccgaccttccagcaccttctgcccctgacttgacggagcccaaggaggagcagccgccagtgccctcgtcgcccacagaggaggaggaggaggaggaggaggaggaggaagaagaggctgaagaagaggaggaggaggaggattccgaggtgcagggggagcagcccaaggtccgtgtttgggggagaagtggagacagagagggtgggggaagggctactcactgaccctgcccctgccccaggaggccccaccgccactgtcacccccgcagccggccagccctgctgaggaagacaaaatgccgccctacgacgagcagacgcaggccttcatcgatggtgagggtgggcgggggccaggctcctcgggtgggcccagcgtttcctgccgtggtggcacaggtcgagggaagatcctgagcttagaccctgctctgactcggccagcacaagccccagtatcttggggagtccaggaagggggcctagggtaagccagtcccaccctcgccagccccaaggggcccttctgcctccccaagggccgcagcttgtttgtgtcactcctggccccactcgctcaggagctgggagcctgggcagcaagtcggggctgctctatagctggtgaggccctcaaggctgtcggggtgaagtccttggccagagcaaaatgagggtatgggagcacacagccacatccatggaaccccgttccccatcctcctggatggggttgaggacatctctgacctccaacccctctcccagctgcccaggaggcccgcaacaagttcgaggaggccgagcggtcgctgaaggacatggaggagtccatcaggtagcgggggctgaggagcggggacacctgtcccacagcgactgctccttgactcccaggggagctggtgatggggaatcactgaggcaaccacaggctgggcctggtccctgcagggagggtccctgggaggtggcagggaggacagcctgggcaccattgctcagccagaccctcctgtgtctgtcgtcctgggtcaggcactggcgtccccagctgccccttaaccgctccgcctccccttccaggaacctggagcaagagatttcttttgactttggccccaacggggagtttgcttacctgtacagccagtgctacgagctcaccaccaacgagtgcgtcccaggaatgcaggggcccccactggcagggtgggaggcgggtggccccggaagtggcaccggcagtttcctgatggttggggaaccatctgcgggtggggcccgagagtgctgccttccatattgagggggagcagaagccaggggccaggtttagggttggtcattggagttggaggtaccctgtgtgtggggactggaggaggcggtggggggtggctgtgggaggaggctggaatccctgcgttccccaacccatatgtcccggtcctccacagatacgtctaccgcctctgccccttcaagcttgtctcgcagaaacccaaactcgggggctctcccaccagccttgggtgagtggcttgggctggccccttccctctgcctcctcctggtgccccgacaccggcccagccctcagcaccctgtgtctctcacagcacctggggctcatggattggccccgaccacgacaagttcagtgccatgaagtatgagcaaggcacgggctgctggcagggccccaaccgctccaccaccgtgagtgcctgcaaggcaggggagctggggcggggagacccaggcctggcccagccgaaccctctcgagcacccgtctgcccatccccaggtgcgcctcctgtgcgggaaagagaccatggtgaccagcaccacagagcccagtcgctgcgagtacctcatggagctgatgacgccagccgcctgcccggagccaccgcctgaagcacccaccgaagacgaccatgacgagctctagctggatgggcgcagaggtgggcggggaggtggagtctcgtcggcctgccccagcaaggggaggcggcgggccctgaggaagatggacccacatggccactctatcaacctgtgtccccatgttccctgcttttttgttttgtttttttgaggtggagtctcactctttggcccaggctggagtgcagtgatgcgacctcagctgactgcaacctctacctcccgggttcaaacaattgtcttgtctcagcctcccaagtagctgggattacaggtgtgcaccaccatgcctggctaatttttagtagagatggggtttcaccatgttggcctggatggtctcgaactcctgacctcagatgatccacctgccttggcctcccaaagtgctgggattacaggcatgagccaccacacccggccatctcctgcctttttttttttggatggagtttcactcttgttgccgaggctggaatgtggaatgcaatggcgcgatctcggctcactgcaacctccacctcctgggtgcaagcaattctcctgcctcagcctcctgagtaattgggactacaggcgccgccaccacgcctggctaatttttttgtatttttagtagagatggggtttccctgtgttaaccaggttggtctcgatctcctgacctcgtgatccgccctcctcagcctcccaaagtgctgggattacaggcttgagctaccatgtctggccatcccctgctttttaaaaaaagatttttttacttttgaaactaaataggccaggcgtcgtggctcacatctgtaatcccagcactttgggaggctgaggtgggcggatcacttgaggtcaggaggttgagaccagcctgaccaacatggtgtaaaaccccatctctactaaaaatacaaaaaaattagctgggtgtggtggtaggtgcctgtagttccagctgctcaagaggctgaagcacaagaatcacttgaacccaggaggtagaggttggagtgagccaagatcatgctactgcactctccagcctgggctacagagtgagactctcaaaaaaaaaaaataataataataagagaaaatagacaaggtctccaggctggtcaactcctggcctcaaatgatcctcccacctcagcctcccaagcagccgggactacaggcaaacatcaccatgtccagctgtccccagctttctaatctggtctttctcttgccccagaacctcaagaaggcatgaagccagcccctgcagtgccgtccacccgcccctctgggcctgcctgtggctctgttgccctcctctgtggcggcaggacctttgtggggcttcgtgccctgctctggggcccaggcggggctggtccacattcccaggccccaacagccttcaaagatgggtaaaggagcttgccctccctgggccccccaccttggtgactcgccccaccacccccagccctgtccctgccacccctcctagtggggactagtgaatgacttgacctgtgacctcaatacaataaatgtgatcccccacccaaacttgtctgtgtctgcctcgctttgctggggtgtggaccggggtgtgggcaggggttgagcgcaggggacgcagctttctgcagatcccacccgggcctcccccaccatctggggatcactcctgaagataccaggtggatggaccctggaccatttctgtcttgagcatccatccgggcccgtgtcccaccttccctgggtctcatctgtgctctgtggaggccaagggttccctcccggggccaaagcccctgctgcagacagacccaggcccagagaaggacgggggcctgggcgctactacacaggctgctcctgcgtgctccccgcgcagcggtgcagagatcacccaaggccttaagattctgaacttttattttctggcatgaaaagtacaaataattaaacaattccatgtaaaagtctgttaccgcggccaggcctgtgatcccggtaataaatagtctaaacgcaacgcgaagtgttcttgttgggttttttttttttttttgtcttttgttttgtctttttttttttttttttttttacagttttttatcacctccaacatggactctgtcgtgatttgaaaccttccgaataaataacaggatgaagggaggggtggaggggctgagccccctcccccctggcctggcccctgccccccagggacgtggaagccccaagtccccctcgcctgggagccccggcctggccccctgcggggaggggctggcctccagggagggggcctggctgggctgagttttgtgttttagaaaaagaagtcccctcccagtcttgggggtggcaggggcctaggcctcggtggggggggggtgtgtggggaggtgccccctctctggagcctggccccccccagggtgggggacaaacccagcccttattgctcggacgccctgctgcaagcttcccacgcggacgtgcgtgttcccgaatgcagagggcggaggggagagagccccaagagacagcaggggagaggggtccctgccctgctgcaggggagaggagagagggcagggaggacttaaaaccacgagaataaataggttcgtgtatcaagaacaagctagggatttcaccagctaaataggactgaaaaaattctcaagacaagagcaaaaagaatcccattggtgacctggacgtcgctggccgtggggactgtcccgcagagcacacgcccccgcgtgccactcggctaccattactgttattaataattattattactttaatgattccacttccccttttataaataaattaggcataaccatgtctcggcaaaacttaaagaaacaaagagaacattgtcgttcctttaacttgcaaaccggatgaagtaacagaaatatacacggatgtccttacagggcaacgaggagaataaatagttaacatagcaataagttaaaactacaagaagctaaattcagcaaaaaagtacaagaaagttaactggtgccagtttatgtcttttttttttttccttttttttttttaaatctcttctgtgtgttttctttttttgttgcttttttttcctcttctgtttgtgtttttttgtcgcttttttgatttttttcttttttgttccttgcagcagaagctccacagacgtttaataacaacaccgggaggggtgggggagagagagctggacagtcagatgggggcgccatagccagacaccaaacgtggggacaccgggggaaggcaacttaactatagctaaagtcgggggttttgcaattctcagttccgatggggccgctgagtggggtggggagcggtgcgagggctcccaggggctccggcctgtggcttctgttggaattttttttttttaaagaaagaaaactagggcgatgcaatgtccagacagaagccgggggccggggctcgagatcgggggctgtgtccactgcaatctggaaagacgaaaaacccaacaaaccgaaaggggataggtaggtgacaagtggacgggaaaggagtgtggggctgggcctttgggcccatccaccccaccctgggcctggcggggagtgccggggtcttgctgccggggaggcccagtcctggtgggggaggctcagggctgggcctctccctcagctgtgtgggccaaggcctcggcccagggggaggctgagccccggggacaggggtgtcctttggcctcaagtgttgtgggggggggggctgcctccagcccaccgtgacgccaaggtggaacgaggtatcgtgtgtctcaatgcatgtgcgctgcgtgtgcacgcctgtgttcgtgggcgccaaggagaccgctgggggtccaggagagatctctgcagagaacctgggggccagggcgagggggccgagagggtgagggagcgtctggggcagggtctggggtgggacctcctgcctgggcctgtgggatgctatgggcatatgtctgcgtgttcctgggtggtgtttgtgtttctccgtgacctggtgtccaaatttgatgtccaaatatctatcgctacattcacgtgtgcacgtggacaggtggatggattcgtgtgcccacatctgtggtctgtgtccacatggacgtagccccagcttctgtctctttctgtctatccctgtccacgtgtctgagtttggccaaccagtcccttaacgtgtctggggcatgtcgctgtgtccgtctgcgtctgtccgtgtgtccccgtggtgtgactgtctgcgtggttgtttctctgtgtggccccgtgggctgctagcccctaagccctgctccctgggccccccccacccccgccccagttggtaaacataacctgccaaaatattttctttttttttttttgtctttttttgtgtttttttttttcaagttcaagaatccccagtaaaaattctccacgaggtctttttccctttttacaaaaatagagtttttcttcccctcccacccccctttttttttcattttgtttctgcttccagccccactgcctgctcccccgcattccaccagggggcactgggccgggggtgcccacacccctcctcacggttcgcttttttggggatttttaaacctgttcctcctaccccaggccccacctaggtgctggggaggcctgggcaagggggtctgggagggcaccccctggagccccccaagccatcccatcgggggtggtcgagggtgggggtgggggcacatctctgcattctttttagccgaaaaaagaaacaaaaaccttcaccatgaaccaaaccaagacgagagagtgaacagcccagcctggggtgggggcaggaggatggggcgggggatccccgggcacccccccaattccctgcagaccctcccaccccagagtgctcaccctgtggcttccgcagggacgtggggccctcgcgtcgtccgtggggctgcctgtgctgtctctcttgggccccttctctctctctctctctctttctctctctctctctctgctgcccggggagggggtgggagggcaggcggggtgggctcacgccttgtgctgtttgctggtcttgaaggagacctgcagcacgcgctcgcccaggcgatagccgttcaggctggcgatggccatggccgcctcgtcatagttggtcatggtcacgaagccgaaacccttgcacttgttggtggtgaaatcacggatgaccttgacgttggtgactgccccaaaaggcccgaacagctgccacagcacgctctcgtctgcctccggtgacaggttgtacacgaagatgcaccagccggcgcccgccgcgccccccgacaggcccacgcccgccaggccgctcataccatcgatggcgatcggcgagaacctggcgatgagcgacaggggactactttgggggtcacgcgggctctgccctgaccccccgcatgcttctgaccccgttgtgacccttcacacctttatgacccctgactgtgccatgaccttggaatggtgtgacccctgcaatgcaatttttttttttagagacacggtctcgctctgtcacccaggctggagtgcagtggtgcaatcatggctcactgcagctttgacctcctgggctcaagcaaacctcccgcctcagcctcctgagcagctgggactgtaggcaggcgccctcacacccagctaattttttttatgatttgtggtgacacagtctcactatgttgcttaggctggtctcgaactctcaggctcaagcaatcctcctgccttggcttcccaagtagctgggactacaggtgcaccactatgccccactaatttttttttttttttttctgagacggggtcttgctctgttgcccaggctggagtgcagtgggatgatctcagctcactgcaacctctgcctcctaggttcaagcgattgtcctgcctcagcctcccgagtagcacctgccaccacgcccagctaattttgtatttttaatagagatggggtttctccatgttgatcaggctggtctcgaactcccgacctcaggtgatccgcccgcttcgacctcccaaagtgctgggattacaggcatgagccaccgcacccagccatgccccgctaatttttaaaaatttttgtagaggtggggtctcgctgcgttagccaggctggtctcgaactcctgggctcaagcaatcctaccaccttggagttccaaagtgctgaaattacaggtgtgagccactgcacccggctttccttttcaaatcatatatttattatcatcaacttcatcttccctgcaagagtttgttccagcccctgaacaacacctagtaagcacttgggaggtgtctgttgaatgaattaatgaaaggacagaattggctccactcacattcctcactggcaatcccgcccttggattaaacccctcagctgggaagggaggacccaagggcctgaaccattcaatcctgaccacgaggaacaaactactcgctccttctggccctctttgcacaggcttttcccactgctaggaactccctttccactctgcctttgtgtggatgttgcctcagatgggactggggggtctctgctgctgggtctccgtcaccccttcttttttttttttctttttgagacggaatctcactctgtcgcccaggctggagtgcagtggcacgatctcagctcactgcaacctccgcctcctgggttcaagcagttctctgcctcagcctcccgagtagctgggattacaggcgcctgccaccgtgcccagctaaatttttgtatttttagtagagatggggtttcaccatcttggccaggctggtcttggactcctgacctcgtgatccgcctgcctcggcttcccaaagtgctgggattacaggcgtgagccaccgcgcccggcctctgttaccccttctacttcacagctttcatcaccattcatttctctgtctcctcccccactagactcagactgagatcttcttttacattttttaattatttttttttttttgagatggagtttcgctcttgttgcccaggctggagtgcagtggcacgatttcagctcactgcaacctcctccttccatgttcaagcgattctcctgcttcagcctcctgagtagctgggattacaggcatgagacaccgcgcccagccacattttttaatttttggagataaggtctcgctctgtcacccaggctggagtgcagtggcaccatcatagttcactgcagcctccaactcctaggctcaagcgatcctcccgcctcagcctcctgagtagcctgaactacaggcatgcaccaccgtatcaggctaatccttaaaaaaaaattgtagagaaggatctcactatgttgcccaggctgatcttgaactcctggcctcaagtgctccttgcccctcagcctcccgaaacactgggagcacaggcgagaaccaccacgtctggctttgatgtcacatctctcaatggccatgctactccaagacccaggcaaacaaggctaagcctgcagccctgggggtgagctggggaggggtgcatcaggggcatggatggtgaggggtggggacagtggggcggggtcactgttacctcttgacgccgtaggccatgttgagcaaattgtccagcctgtggaggcagaggtggtggtcagaggtggcttccagtcacgcccccctgctgtgacaccgtcggcctgccctccccacccccacccaacaggcctgcagcagagccctgcccccgcctgcctgctccccgcccgcccggctagacactgcctggcacggaaccgtggtcactcaggcaccgcctctcgcctgccccaccgctgtccagcctgcactggcctcctcatccatcctccccctcctggctggcgggtcccctctgggcccaggcgctgggatccctggggaaagataactcctaacaaaggcgacagtaactaccacagccaacattctcgcagcacttgagggggtgggtaacttgccccggccacccgggggcccacaaggggcttccattgtctccccttggagtggctatgagcttggactccaggtcctgggtttgagtctctgctctgtttgggccaggcaaaccccaacacctctctgtgcctcagggtccccgtccataaaacagggacaacacaagctctgttctcatcgggttgcagaaaaataagggtgtctagcacacagcaaagactcatgaaatatttggtgttattacagatgggaaactgaggcacagagctacagccacgtgcccaaaagagaaaggggccaccagagctggaacccagatgacgccaaaatcttttaacaccaagaatgccaatcgtcgcggccagcacacattgagggcctgctgtatatgagtggctggccttggcacctgacagataggctccttggctcccatgtgtgcgcaccctcccggcatccctcccttcggcaggaatggggttcagggagggttgcaagcttgggggcacccggcctggggccatctggctggcagggggctcaccggaaacgctgggtctgatggtgtagggggcctgcgtagcgccgggcggatgactggtagaggtgggtgagcagcgcctgccccgtcttctgacttgggttgttcgcgaacttgactgtgatgggctcagctgcgcccagcggcttctgcccattcagtcctttgatagcctcttcggcctcaatcctcttgtcaaagcggatgaatcccacaccccgagagacacctgccagggggcagggatgtccatcacgacgaccctgtcccctcctgtgtaaccccacttctcccttccctgcttcatgccctggcatcttggtcggtttccccacgttggtcccacctgactgcctttgcccagcgcccccgccaggtgcaccctccctgactgcctgacctgtgacctggtccaccaggatgcgggacgtgatgatgcggccgtactgggagaagagctgctccatctctttctggctcatggtcttggggagcccgctgacgtacaggttagcatcccggatggatgctgaactgggtctggcataggacacctgggtgagggggtcagatggacaggggtgaggcagagacccatttcacagatggagagagtgaggccatgtctaaaccatcacggagttagcagaagtgacccatccgtcactcaataagtatctctagagttgtcaccgtggggtggggctgagtcagatatgggagaggggacatggcagtggctgtaacaacttggactgcctgtatagagtgatggggacctgccacctagggaggacatgtctccctggggtgacatgtgaccccaaagggatccttgaatagccggctcacatcactatcacatgcttgacagtccatcaacaaacattgacctttttttttttttaaagacaggatctcacttttttacccaggctggaatgcaatggtgtgatctcagctcactacagcctcgacctcttgggctcaagcaatcctaccgcctaagccccgcaagtagctgagactacaggcgcccaccaccacgcctgaccagcattttttttttcttttttttttttttgagatggagtgttgctctgtcgccaggctggagtgcaatggcgacatctcggctcattgcaacctctgcttaccgggttcaagcaattctcctgcctcagcctcctgactagctgggattacaggcgcccaccaccacgcctagctaattttttttttatttttttgtatttttagtagagacgggtttcaccatgttggccaggatggtcttgacctcttgaccttgtgatccgctcatctcggcctcccaaagtgctgggattacaggcgtgagccaccgcgccttacctaatttttataattttagcagagacagggtttcatcatgttggtcaggctggtctcgagctcctgatctcatgatccgcccgcctccgcctcccaaagtgctgggattacaggtgtgagccacctcccccggcctcagctaatctttaaatttttttttttgtagaaacaggatctcactgtgttacctaggctggtattgaacttctggcctcaagcagttctcccatctcggcctcccaaaatactgggattataggtgtgagccaccatgcctggcctatttttattttattgaaagacggagtcttgctgtgttgcccaggctaaatgcagttattattcacaggtgcaatcatactgcactgcagcctccaactcctggactcaagccatcctcccacctcagcctcccaagtagctgggactacaggcatgcaccaccacacccagccactcttcccactcctatagagagtggacctaagacactggccccttctcttcccagctacactgggccccccagggacactcaggtctttagtcatcagctcccaaatgtccccagtctgcacccctggtggcaactgcatccaggtgccccacatgggggtgtcaagggcacttcatacacagcacgggtgcctcctgctcccgcccgcctccaatctgccccaactcactaatggcaactctgtcctcctaagtgctcatgtccccaggttcaggttgttctcgacacctgttcttcacatgcacatccaacccactctaaatcctgtaggctctaccttcctccttatccagaatccacacacttcaccccactgccactgtcccaccctggcccagccttcactactgatcacctggaccagtgcagcagcctccaccctggccccccctgctcccatcccccactgtctgtcccccctacggcagccagagggcgcctgtgaacacctgagccaggtcgcatcccccctctgctcagaaccctctatggctcccaccttcctcagcagaaaagccaaagtcctttccttggaccgcaaaaccctgcacattcttccccatgacatccttgccctcatctccccctacttcctgccccaattactgtgttccagcaacttgaacttcccccatttttcccaaacacaccaggcatgtctcagcctcagggccctggcattgcctgttctctctgcctggaatgctcttcctcctcttctttctttgggtctcagttgaaacatcctccctgtcctctctcatctaaatttgtcctccccccaccacccctattactctttctcaaagcacttctcctaactaggaattagacacattttagcactgttatctgaatcacattattaattatagtccaacccaacaacgaaactctctgcaggtgtttaaaaaaatggtgggtcaggtgcagtggctcatggctgtaatcccagtgctctggaagttcaaggcaggaggatcaagggagcccaggagtttgagaccagcctggacaatacagcaagactcacccccgtcctccaccgccacaacctctacaaaaaaaaaaaaaaaaaaaattagctgggtgtggtggtgcacacctgtggtcccagctactcgggagactgaggctggaggatcacttgaacccaggagttaaaggctgcagtgagctatgatcacaccactgcactccagcctgggctacagagcaagaccctgtctctaaaaaaaaaaagagaaaaagatggacatatatatttatttcccagaaacggtggtgactggtgagtattgtaaaatgggggacagaaaagtctatttacaaagcagggaatattgtgtgaccttgtttcattgtgtgtttatcaatgtcctggaagcatggtagggaagtccacctctcaaatgctcagtgggtgacctgtcaccagggactggggaagaggctggggcgtggtcatcagcaattctcccccttatgtctgctgtatctatttttcctccctccctccctccctccctcccttccttccttccttcattccttccttctttccttccactctccctccctccctctttcctccctccctccttcccttccttcctttcctctttctttttcttgttaagtgaggtttttgtttgtgggtttgttttgagatggggtcttgctgtgttgcccaggctggagtacagtgatgcaatcatggttcaccacagccttgacccccccgggctccagcaatcctcccaccctcggcctcccaaagtgctgggactacaggtgtgagcctttgtgcccagcctctattttctgtttcttctaattaacctcttgatagataggggtcattgtcttctggcttttgtttgggacagtgagttgagacagtgagttgtgagagtgtatgcctccattagaaataactaattaaagctgggcgcggtggcgcacgcctgtaatcccagcattttgcgaggctgaggcaggcggatcacaaggtcaggagatcaagaccatcctagctaacatggtgaaaccccatctctactaaaaatacaaaaaattagccaggcgtggtggcgggtgcctgtaatcccagctactcgggaggctgaggcaggagaatggcgtaaacccaggaggcggagcttgcagtgagccgagatcgcgccactgcactccagcctgggcaacagagcgagactccgtctcaaaaaaaaaaaaaaaaaagaaataactagtttaaaaatgaacaaaatagataaagcagtttgagagtgaatggggggcagggtctgattaatataattttgtgcacctggggttctccagaaaaaaaaatcacatcagccattgtcatgtccataataatgatttttaaaatcacagccaggccaggcacggtggctcacgcctgtaatcccagcactttgggaggccgaggtgggcagatcacttgaggtcaggagtaggagaccaccctggccaacatggtgaaaccccgtctctactaaaaatgcaaaaattagccgggcgtggtggcgggcgcctgtaatcccagctactcaggaggctgaggcaggagaatcacttgaacctgagaggcggaattgcagtgagccgagagcgcaccactgtaatccggcctgggtaacagagcaagattccatctcagaaaaataaataaattaattaagaaataaatcatgtccatgctgggcacggtggctcacgcctgtaatcccagcactttgggaggcttgaggggggtggatgatctgaggttgggagttcgagaccagcctgaccaacatgctgaaaccccgtctctactaaaaaaaatacaaagattagccgtgcatggtggctggcgcctgtagtcccagctacacgggaggctgaggcaggagaattgcttgaacctgggaggcagaggttgcagtgagccgagatcgcgctactgcattccagcctgggtgacagagtgagactccgtctcaaaaaaaaaaaaaaaaaagaaagaaagaaatcatgtcaatgtatttgacagttttctcttctttttttctctcccatggggctaggagctgtgagggtacttgctgatgaatcagatttgggttgagggattagatttgggggtaagatcctgggtggatattggaggtccaacaccgtctgagacacagaggaggttttcacaggccttttccatccctccatgacatgggtttcccaagggcaaggatggaccaaactccacccacaccccaccctgggatggggcctggcccgcggcaggcagctggagatattttgggcagctgccatagcgcccagtcctgactgaccgcgcaacaccgtcacacaggcaaaaacacccagggacagacagaaggccatgcagtgccgccccgctgcacagcctcagagatgaaaccagccagagggtgacacaggccactgtcacattctcagcaacgttcaggagggagtctcagagaattacagtgaaggtcgtagaaccacatacccatcacagcgcagcacaaacacacgatatcacactcaatccctcagagcagggcacaggtagacacacccacacaacatcgcggtgacacacaaacatcctgccagagccagacgcatccctgaggccccatcaggtcacagccggagtcacagtgtcacatgcacctgtcaaataataagcacgtcatcctgggccgggtgcggtggctcacacttgtaatcccagcactttgggaggctgaggtgggtggatcacgaggtcaggagttcaagaccatcctgaccaacatggagaaaccctgtctttactaaaaatacaaaattagccaggtgtggtggcgggtgcctgtaatcccagctactcgggaggctgaggcaggagaatcgcttgagcctgggaggcggaggttgcagtgggccgagatcgcgccattgcaatccagcctgggcaagagagggagactctgtctcaaaaaaaaccccaaaaaatcaaaaaaccaaaaaaaaaaaaccttatcctacagacacatagggatatacccgaagtcttaaatacacagatgcacttgacagcagcctctctctccctccctctctctccctctctctctctctgtctctctctgtctctctctctctctctctctctctctctatatatatatatatattttttttttttttagacagggtcttgctctgttgccgaggctggagtgcagtggtgaaacatgactcactgtagcctcgccgcctcagcttaagtgatcctccccactcagcctcccaagtagttgggactacaggtgcaagatgccacgcccagctaatttaaattttttttttttaggaacagggttttgtcacgttgcccaggttggtctcaaactctcgggctcaagtgatcctcctgcctcggcctcccaaagtgctgggattataggcgtgggccactgtgcctggccacagccactcgcacactgtgtcccacaaccattgtgtcacagccagagccacagtgagtcacgggacacctggatcataaacactgtatctcacaactcaagatgacacacacacaccccacacacacatacacacacacatacaccacacacaccacacacacaccacacacaccacacatacacatacatgacacacacatacacacatcacacacacaccccccacacacatacaccacacacaccacacacacacacatcacacacacaccacacacatacaccacacacacatcacacacaccacacacatacaccacacacaccacacacacaccacacacacatgcaccacacacaccacacacaaaccagacacacacatacacaacacacacaccacacacacatacacacatacacacaccacacacaccacaaacacacaccacacacacaccacacatatacacacaccacacacaccacacacacgcaccagacacacacatacaccacacacacaccacacaccacacacacatacatacacatacacacaccacacacacaccacacacatacacacatacacacatcccacacaccccacacagacacacacacaccacacacacatacacatacaccacacacatacacaccacacacatacacatacacaccacacacatacacataccacacacacatacacgtaatacacctacacgccacacacatacacacacaccacacacatacacaccgcacaccacacacatacacaccgcacacatacaccacacacatacacacacacacaccacacacacacacaccacacacatacacacatgcacacacaccacacacacatgcgtacacacacacatgcgtacacatatacatacacacatacacacacacatacacgctgcatctcaatgtcactggggtctggggtcctcatgccctgaggcttctgggtctcgttggccatgaagggacccattgggtcacaacttcactcccccaccccaatccccaaccccccacatcaggaaagggaagagattcctgcacctctgttcccatgttgaactgggggccagatgggccacccccccgaccctggcttcctccagggtccgggagcagatttgcagggcggagcccaaacacccccaggcgaacccagagaggggggtttccatgacgattcccccccagggaacctgggcttgtagggtcccagctgcagctgctgagaagggaggtcctgggggaggggcgttgcacaaagatgggggatgggccgccccaatcccgccctcccagaccctaattaggctccagatggcagatgggcccccacccccatttccatgacaaaagcagggaggggactgctcacaggaccctggtcactctgccttacagggcctggctgactccctgagcctccagagatcgtggagccagtactgtccccattgacaggtgaggaaactgaggtttagagagggaaagccattgcccccaccccagctaggaagtcttggaggggagatttgagcccctctggggatgagtcctgaaaggcagtggacatggatgcatgggggcgggtaggtggcagtagggggttggggacagtcagttggggtgggcggtcatgggggattggagaaggaggcaccaaccttgatggtcttcgtctgtaatttgaggccgttgagggtgttgatggctttgtctgcatcattggggtcagaatagttcacaaacccgtagccaaggctctgccctgtgggcagaaccagaatgatgaccttcccacccagccttgacacctgccagtgtcccacctcaggcctgagagactgtcccctccccaccaagtttccaccttcctgtttccagatgacaccttcgatgctagagtcccacctgcctccatcgctcctgagaccttcacctagggggtatacccatctccccatcagacctcacatccctagaccacctcctgcctcgattacccccgagacacctcagcaagggtcccacctgcccccatcacctctgtatttctgaggctaccacctctgttcctccccgcaactccagcagccacacctgtgatcttgtcccgaaccaacttgcaggactcgatgtcgccaatgctgccgaagagactcttgaactcatcctgggtcatgttctggggcaggtagttgacgatgaggttggtcttgctgtcgtcagtggctccatttgtaccaaggagtggcccgttgggcagggccgggccggccgggcccccccccacctgagactccatggcccccagtatctgctggagataacaggtcgcatccgctcaccgcccagtccccacaccaggggcctgcggcaatgagtggcttggtggtgatgaattagccatgtcttataggggcttcgtcatggggaggggtcactttattattctaatgatgggaataatgatgggattccatatattggaataagcattggggggaaacaaagcacctgatgtttttactgcaagaaatcccttatatgactactatatacgcaaacagaggcctaaaatcaacctgtgcatttacaaaataaaaaacgctttcacaccggaaacgctttcacgtcgggcgcagtggctcacgcccctaatctcagcactttgggaagctgaggcgggcggatcacctgaggtcgggagttcgagaccagccagaccaacatggagaaactccatctctactaaaaatacaaaattagccgggcgtggtggcgcatgcctgtaatcccagctactcgggaggctgaggcaggagaattgcttgaacccgggaggcggaggttgtggtgagccgagattgcgccattgcactccagcctgggcaacaggagtgaaattccatcttaaaaataaaataaaataaatgctttcgctctcagaaaagtaaatctaacagtagctttctttgtttttgttgttgttgtttgttagttggttgctctgtcacccagactggagtgcagtggtgcgatctcggcttgctgcaacctccgcctcttgggttcaagcgattctcctgcctcagcctccagagtagctgggattacaggtgcatgccactatgcacagctaatttttatatttttagtagagatggggtttcggcacgttggccaggctggtctcgaactcctgacctcaggtaatccacccacctccgcctcccaatgtgctgggattacaggcgtgaaccaccgcgtctggccccatttttagtagcttttattttagaaaaagggtctcgctctgtcacccaggctggagtgcagtggtgccatgaagtctgactgcatcctcgaccttccaggctcaagcaatcctcccacctcagcctcccaagtagctggaacaataggcgcatgccaccatgtctggttaattttaaaattatttgtagagatggggtctcactatgtggcccaggccggtctcaaactcttgggctctggtgatcctcccactttggcctcccaaagtgctgggattacaggtgtgagctactatgcctggcccttttagtagctttgaagcctcataagcccttccctaaacatatttatttgcctcctcccaccaaaggtaattcctatcccaaatgtgctaattatgtcttttgcttcatgcataagtttcttactagtcatttacctgccttcatctccccttgccacccccagttttcccactgagctattttgttcttttgcttttattgtataacataaaacaccttcaaataatgacaattttattttttcatcttcagtctatacctgttatctatttttcttgtcatttcaggggctacagtgtgatagtggcttctttattcctgattttttttttttttttttaaagacagagtctccctctgtcacccaggctggggtgcaatggcacgatcttggctcactgccacctctgcctcccaggttcaagcaattctcctgcctcagccttccaagtagctgagactacaggtttccaccaccacgcccgccaaatttttttgtgtgtttttagtagagacggggtttcactatgttggccaggctggccaggctggtcttgaaatgctgacctcgtgatctgcctgcttcagcctgccaaagtgctgggattacaggcatgagccaccacgcccggccctttattcctgctgttaagggagatgctttaaacattttgcagccaaacatgatctttgctatgggtttttttctagatggcctttatcgggttaagaacattttcttttattcctagatcctaagacttttttaaaaaaggatgttgaattttattgactttttttttacatcaattgaaaccattttttagctttaattaattaatttttgagacaaggtctcgctctgccacccaggctgaagtgcagtagggcaatcttggttcactgcaacctctgccttccaggctccagcaatcctcccacgtcagcctccccagtacttggggctacaggtatgcgcctccaagcctggctactttttttttctttgtatttttagtagagacggggttttggcatattgcccaggctggtctcgaactcctgggctcaagcaatcctcctgctttggcctcccatagtgttggaattacaggcgtgagccaccgcacacagcccattttttagctttaatacattaatgtcatgaattacgttaattgattttcttttttttgcgcgggaggggggacggagtttcgctcttgttgcccaggctggagtgcaatggcgcgatcttggctccccccaaactccgcctctcaggttcaagcgattctcctgccttagcctcctgagtagctggaagtataggcatgcgccaccatgcccggctaattttgtatttttagtagaggcggggtttctccatgttggtcacactggtctcgaactcttgacctcaggtgatccacccgcctcagcctcccaaagtgctgggattacaggcgtgagccaccgtgcccagccgttaattgattttctaatattaaatcaatcttgatgggataaaccaaacttggtcatgcatattgcagttttgtttatatacattgcttgatttaatttgctgaattttttggtggtttagcatttttttacatatatgttgaggaggacatgctgtttatttaattcacacaaagactctaaaatggtagaagttggctgggtacagtgacttacgcctgtaattccagcactttgggaggccaaggtggacggattgcttgagctcaagagctcgagaccagcctgggcaacatggcgaaaccctgtctctactaaaaatttaaaaactagctgaatgtgatgttgtgtgcctgtagcaaagatacttgggaggctgaggtgggaagatcacctgaggtcgggaggtcaaggatgcagtaaaccataatcacaccactgcactcctgcctgggcgaccgagtgagaccctgtctcaaaaataaataaataaagctgggggcagtggctcaagcctgtaatcccagcagtttgggaggctgaggcaggaggatcactggaggtcaggagttcaagactagcctggccaatatggtgaaaccccgcctctactaaaaataccacaattagccaggtgtggtggcacacgcctgtaatcccagctactcgggaggctgaggcacaagaattgcttgaacccgggaagtggaggctgcagtgagctgagctcgtgccattgcactccaggctgggtgacagagcgagaccccatctaaaaataatagtaataaaataaataaataaggccgggcatggtggctcacgcccataatcctagcactttgggaggccgaggcaggcagatcacctgaggtcgggagttcgagaccagcccgaccaacatggagaaaccccgtttgctactagaaatacaaaaaaaaaaaaaaattagccgggcgtggtggcgcatgtctgtaatcccagctactcaggaggctgaggcaggagaatcgcttgaacctgggaggcgggggttgcggtagctgagatcccaccattgcactccagcctgggcaacaagagcgaaactccatctcaaaataaaacaaaataattaattattaaatggtataagttaactttgctatgatagatggagaatctgaggcttaaagatgttaaggaacgtgctgaagtcacatagcctatctgctctggcattggaaatgaaatgaagaccctcggaatgtgaagaccactctacaattttcttttctttttttagagacaggatcttgctttgttacccaggctggagtgcagtgttgtgattgtagttcactgcagcctcaaactcctgggttcaagcattcttcctgcctcagtctcccaagtagctaggactacaggtgggcgccaccatgcctggctaatttttaaaaatttttttgggctagacgcagtggctcatgcctgtaatcccagcactttgggaggccgaggtgggcggatcacgaggtcagagtttgagaccagcctggccaatatggtgaaatcccgtctctactaaaaatacaaaaattagccgggcatggtggtgtgcgcctgtaatctcagctactcaggaggctgaggcaggagaaacgcttgaaccagggaggtggaggttgcagtgagctgagattacatcattgcattccagcctgagcaacagagtgagactccatctcaaaaaaaaaaatttttttttttgagccaggcgcagtggctcatgcctgtaatcccagcactttgggaggccgaggcgggtggatcatgagttcaggagttcgagaccagcctgacccacgtggtgaaaccccatctctactaaaaatacaaaaattagtggggcgtggtggcacacgcctgtaatcccagctactcaggaggctgaggcaggagaattccttgaacctgggagacggagtttgcagtgagctgagatcgcgccattgcactccagcctgggcgacagagagagactctgtctcaaaaaaaaaaaattttttttttgtagagatggggtgtcactatgtcgcccaggctggtctcaaactcacagcctcaagcaatcctcatgcctcagcctcccaaagtgttgggattacaggcatgagccactgaacctggcccaattttcttactgtaacagtcaaccaggctggtactggctctgacaactcactatgcgtctttggatatgcctgctagggcctctgtttcactttgctgaaaattcagaacaattggcaagggctatatgaagggctatgtagaggagaattttaaagccacttcagaaatcagcagcaaacagtgctgggatttgactgaccttatctgtcagggacataagaaggtcaagtagccagcatttccttacatcttcttcagtggcacagttggcacataggtttaccctcacttgaaaacctgaactgggccaggcatggtgggtcacggctgtaatcccagccagcactttgggaggctgaggcaggtggatcatctgaggtcaggagtttgagaccagcctggctaacatagcgaaactgtctgtactaaaattacaaaattagccaggtgtggtagtggacgcctgtaatcccagctactcaggaagctgaggcaggagaagtgcttgaacccaggaggcggaggttgcagtgagccaagatcgcaccactgcactccagcctgggcgagagcaagactccgtctcaaaaacaaacacacatactgattggtagtgtcttcctagaggaatgaattaagaagaattcagaaaccacatttaggcaaggcgtgctggctcatgcctataatcccagtactttgggaggccgaggtgggaggactggttgagctcaggagttcaagcccagcctgggcaacacagtgagatcttgtctctacaagaaatttaaaaattagctagtcatggtggcttgcacctgtggtcccaggtactcaggatggtgagacaggaggatcacttgagcccaggaggtggaggttgcagtgagccatgatggcaccactgtactccagcctgggcaacatagtgagacactgtataacaaaaaagaaaaagaagaagaagaagaaggagagggagagggagaacgagaaggagaaggaaaaggagaaggagaagaagaagccaggcgtggtggctcacgcctgtaatctcagcactttgggagaccaagggggggtggatcgccagaggtcaggagtttgagaccatcctgaccaaacatggtgaaaccccgtctctactaaaaatacaaaaattagccaggtggggtggtgggcacctgtaatcccagctatttgggaggctgaggcaggagaatcacttgaatccgggaggtggagattgcagtgagccgagatcacaccattgcactccagcctgggtgacagagtgagactctgtctcaaaaagaaaagaaaagaggcagggcgcggtggctcacacctgtaatcccagcactttgggaggccgaggcgtgtggatcacgagatcaggagatcgagaccatcctggctaacacggcgaaactccgtctttactaaaaatacaaaaaattagccgggcatggtggcgggcgcctgtagtcccagctactccggaggctgaggcaggggaatggtgtgaacccaggagacggagcttgcaatgagccgagatcgcaccactgcactccagcctgggcgacagagcgagactccctctcaaaaaaagaaaagagaaaagaaaagaaaaagaaaaagaaatcacatacagttttcagtaggaaagatcactgtgattgattagcaatgtctgctgtggccacacaactagaaacagccagcaggtacatattatctcaaccatccctgactcaagctccaatatcttaattgttcccaaatattggctactactgtgtgccaggcactgtgcaaagcactctacatgcaagttttctgttcttattcacaacaatcctaaaaagagaatttttcctcccccacttcacccccacttaatacatgaggaaactgagatattttaaaaattgccaaagatcatgcagcatataaatggtggaacagggatttgcatatgagtttttctgatccagagtgtgcatttccaacttccactgccaaccaagaacagtgccagctctaacatttcccagctgtgtgtcctcagatagactacttagtgcttctgagcctctgctccattttgctgcaaactccaaattatagtcacactggcctggggtagtagctaaagccatatgctgtaaagcatctggaattggttagttacgtctgtcatgggcatgatcatgggaattaaaagcaggcttgtcacatccatcatccgtacctcataatacacctacattatttattattattattagagacggggtctcgctctgtcacccagactggggtgcagtggtatgatcatgactcatttcagtctaaacctccggggctgaagtgattcttacacctcagcctcctgagaagctgggactacaggcatgtgccaccatgcctggctaatttttttaattttttgtagagatgggttcttgctatgttaccaggctgatctcaaactcctggcctcaagtgatcctcccaccttagtttcccaaagtgctaaggattcagttgtagccaggcacggttgctcacgtctgtaatcccagcactttgggaggccgaggcaggcagatcacgaggtcaggagttccagaccagccttgccaacatggtgaaaccctgtctctactaaaaatacaaaaaaattagccaggcgtagtggtgggtgcctctaattccagctactagggaggctgaggcagaattgcttgggaagcagaggttgcagtgagttgagactgtgccattgcactccagcattgcacaccagcctgggtgacagagtgagactccgtctcaaaaaaaaaaagaattcagttgtgagccaccatgcctggcctattattcttttatttaaagatggggtctctctatgttgtccagcctggagtgcagttattattcacaggtgcaatcgtagtgcactgcagcctccaactcctggactcaagcaatcctctcatctcagcctctcaagtagctatgactacaggcatgtgccattgcatggggcaatactgctattttattttattttatttttttgagacggagtcttgctttgtcgcccaggctggagtgcagtggcgcgatctcagctcactgcaactccgcctcctgggttcacaccattctcctgcctcagcctctggagtagctgggactacaggcacccaccaccacgcctggctaattttttgtatttttagtagagatggggtttcaccgttagccaggatggtctcgatctcctgatctcgtgatccactgcctcggcctcccaaagtgctgggattacaggcatgagccaccgcacccggcctaatactgctattttaatgagcattccactacactgagcatctactgtgtgccaggcactgtgggaaatactttgaggcatattttcagttactctcccaacaatcttaaaagactgagaacacattctccattttacaggtgacaaaagtgaattcagagacgtatgaatagggaaattcatttcagtcctggatctgtttgcagagctgtttttcatcattatggccaatgccttgtctcgctatgttgcccaggctgaccctgaactctcaggctcaagtgattctctcacctcagcctccccagtagctaggactacaagtgcaattcatcatgcccagctaattttttattttttgtagagatgggatcttgctatgttgcccaggctgttctcaaactcctggtctcaagggatcctcctgcctctgccttccaaagtgttgggagtacaggcatgagtcactgcacctggtcaccatctactttttttttttttttttttgagacagagtcttgctgtgtcacccaggctgcagtgtagtggcacgatcttggctcactgcaacctccacctcccaagttcaagcaattctcctgcctcagcctccgaagtagctgggaccacaggcgcgcaccaccatgcacagtgaattttttgtatttttagtagagacaccgttttgccatgttagccaggctgatctccaactcctgacctcagatgacctgcctgccttggcctcccaaagtgctggtattacaggcataagccaccacgcctggcccatttactcttgtaaaacagatggcacagaaggtcagctcccctgcatctccaattggctgagttgctcctgggagggctgcctggaggactactctgaagacacatccggcctcaaaaggaatatgcattgggttgattagcaatgtctgcaaggcacccgcagtgatgcagtaacatgcactgcacagctctgcattcccgtctcctaacattaatacttaactgatcgcgtaaccatgtattgaggtgcctgttgtgtgccaggaaaaattcctcatgtgaaacttccaggtggttctcctgccgttgaacatgatgagattcctttctccatttaatacacgaggaaagagagtctcaatgaagggacagggtgactggggaggctgagacaggaagatcatttaagcctaggagtttgagagcagcctgggcaacacagtgagatcttgtttccaccaaaaaatttccaaaaaaattagctgagtgtggtggtgcatgcctgtagtcccagctacttgggaggctgaggtgagaggatcaacttgagcccagaagtttgaggatgcagggagcgtgatcatgccactacactccagcctaggcgagagggtgagaccctgactcttaagggaaaaaaaaaaaaatgaaggaataggaacagagttgcataggcggcaaatggtgaaacaagaattcaggctgggcttggtggctcaggcctgcaatcccaatactttgggaggcctaggcgggaggatcacctgaggtcaggagttcgagaccagcctggccaacacagcgaactctcatctctactaaaaatacaaaaattagccaggcatggtggtgggcacctgtaatctcaactactcgagaggctgaggcaggagaatcacttgaacctgggaggcggagcttgcagtgagccgagatttcaccactgcactctagcctgggcgacagagaaagactctgtctcaaaaattagaaaaataaaataaaaaataaaaaaaaaagaattcagttccagggtttggactttagagcccactcccctaacgaaaagaccagtaatataataacaaaataataacagcaaagcgaagctgagtacctgctctctgccgtgccctgggcatcatgacatttaaacccactccatcggttgagtctattaattcaattcaacaaatatttactgagggctacacatgtcagactccaccctcctcatgctgtcctctgatagttaggtcacctctctatgcctttctgttcttccttaaggaaggtatggcacagaggtctcacatgtatggagctggattctgaatttgcatcctggttcattaagagttttgtggggtttttcttttccttgtttatttttgagacagggtcttgctctgttgcccagtctagagtgtagtggtacgatcatggctcactgaagccttaacctccttctgcctcaacctcccaagtagctgggactataggcttgcaccacccagccggctaatttttctctttttctgtagagatgaggttttgccatgttgcccaggctgcgatcctcctgccttagcctcccaaagtgctgagattacaggtgtgagctccaccatgactggccctggagatggattctgaatttgcatttaagctcattgaggtaagagttctatgttgagttgctgatatttgctataagagcccagtgagcagttggcagtacacaagccactgcttctggacatgctagatccctatttttttttttttttttttgagatggagtcttgctctcttgcccagcctggagtgcaatggcatgatcttggctcagtgaaacctctgcctcccgggttcaggcaattcttccacctcagccaggtagctgggaccacaggtgtgcaccatcgcgccccgctaactttttatatttgtagtagagacggtgtttcaccatattggccaggctggtctcgaactcctgacctcatgtgatccacccaccttgggctcccaaagtgctgagattacaggcatgagccaccgtgctagatcctatttttgaactccactgagcatgtgcaaagttttcattgacctcccacaaccacagtgaatggtatgaagggtctcctccatttctcagatggggacactgagggttagtcacagggacctatgacttgtccagggtgacaggaggaggtggaggggatggtgtcaacatctgactcctgatccgatgaccctagagccgaaagagttactggctgcccccctcccatggtgtccccaacctgagcagagtgaagaggtgactgggtggttcagacccaggttcttgaggcctagcctgctaatctggccaccacccgttctccctcccatttgtgccagagcttagcgggaccagtatctcgtttcctctgtggctgagccggctgagctgataatggggatcagattgatggaagccacacccgccctgccccagcctgcagtaagtgcacagcctgggatggtggctacatgggcatcaaagggacttcggcgactggccccagacagagatgggggggtggcaaagtcagggaggaggagggcagataaaagatggagggttagggaagcttcccattctctccagtgcttcttctaagtctcccccgacttttggtttctctctccctctttcttcctctgtttccctctcttctccactgtcctgccctctctctgaaccgttctgtgtccctggcctcatcactctctcttcctcttttccaccatcgcacatacatctgacgtatgggttttgcagtgaacacacctgaggccacttttttcttaaaacctcctgtgtctgacccccacggcccccagctgcggcccctggccccagtcacagtgacagatgcctggataccggcgacaatagggcattgagtggctatgcatggtgaggctgggctaccacgtggtgctgactgagcctcctacttctgggcccttcttcaatgcagggtcctcctggtcttaatttgtcacctctcttcctcccagcctgtccccatgatacatctctgccccagggctcgctcactggagaacctaggtcctcaaggcccttgtgtgacctctgaccacaccctctttccctttgtgcattagtttcctttttcaaatgagagaaccgatcagaggacgcttaggagatgctggactgttgcgggagttctgaggtcctcaggaggccacactccagttcccagacctgggtgaacagcacgaggcccagagagggaaaggaacggcctgaggtcacacagcaggtgagccaggcctccgggacctcatttctcagagccaggtgggcgggtcccagggtccaggaggggagaggcttaggcatggagggagcgccaatcatgcccccacccccagtgctagccacgactcgaaaaaggggcccggaaagagacacaatgcacagagacacacacgcagagacggagagataggaagagtggaagagggaggcccaggcgccgggaccagacaaaggacgcgcggcggcgcggggagcggagtcgcgcggcaggggcgggggtggagccggggtggggctataactggccagccccgcccccgggatacgcccgggctgccgagtgggaatccgagggctcgggcgaggccgggcccccggggccctgggggcggggcctagatgggcgtgcccgggcgtggccaggcagggcgtggcagggcgggaggggctgcgcgctcgggagctgaccagctccgtggctgctgaaagcaccgagcgcggggctagcggtgcgggcgagcaggcgggcgggccgcgctcaaggtcacctcgcggcccagagccttggcgaggtggggagcctggacctggcctaagggggctgtctcggcctcccaccccatctcccggggggcggagacccgggagcccagaggtgcccccccaacccgcgggccctcctctcccctccccctccccgcagcccgaggcgcccgcgcgaggctgcggcccgcgaagaagcgccgagaaacaaagggacgcggcagcagcggcggcgggcccgcggggcctccgggcgcgccccctcctctcccctccccgcttgccgcaaggtcgacgggctcgaggacgagacgcccgcctcccgggtgcggccgaggcccggggcgcgcgatccgacgccacccgctttcccagggctctcggggacgctttgtcgctttggcttggcccagcaccagtgatcgggccctgcgtttgcctgggcggcctgcggggtctgggcctggatggaggaagcatccttagccgccgcggcccctcccccatcaggcctgctggagagggggcaatcccgcctccagggcggcgtcggacgcctcccgaatcgcagtcagtctccctaaggccctctcagaccaagctctaagcgccctcagcactctgggcgcggccctgcccactctcaggccccgaggcttggtcctacccccccaacccgggcctagctaggcctggtcctaccccccccgccgcacccgcccaatctccgcggagcctgggcccaactcctccccgtcccgattccctttcggcgacaggggaatacctacagtgaccattcttgtgtgcccggcgggcgcggtccgtgttgaggggggctccgggggtggtgcactcctaggggggcgcccgatgctcacgctggggtcccgcccgggcggcctctggtgcggccgctgcagatgtggcgatgaaggcggcggctccctcgagggccagggacgggcccgaacccggggatgcgcgcgcggatggccgggccccggggtggcctgcgggcggcaggggatggaaagagggagcgggcgcggggttgaggacgccccctgcgcggccccgcggggcccggggaggttgcgcttcccgacagagatcgcggcgctctgcctttcgccgccgcccctcggtcggtcctgtccggtcccgtgtgttcaagtcctctcccctcgcccaccctccctccctccctccggcccgcgctgcgcgctccgcgctctggaccgcgccgccgccgcccccagccctttatagcagcagctgccagcgccggcgtcgctcattggctgcggcgaccgagctccgcctcctcgcggctcccgacggcgcggcaggtggaagtgagcgcgcactggtcgggactctgaatcccccaaaagcgcatcctaggtgctcgggttgccagatttgggccctccttccctcgaggcccttgcttcctaccctggcaccccttcttgggctggctttcgggccaggagacgggctcccctcctccgtccagctcctagagctggaggagccaacagagcgaggaggtattagtggcctgaatatgcgaccttccagaggtgttgtccactgagggaactggacaggggatcaggaaccaatattttagtaggcagaggcctgggtccccagatttggaggcaccagtgtagaccacctcaagaccacgggggagggtggctactgtggccctagtcttctgcagaaggagactgggacgctgttggttttgagtgagctggatccttctagggttcaaaaggtaaggactggcactccccagtgcaaggaaactccgcactgctccgaagggggtgaaaaggtttggggctcagtgttctggacaatcatcgctggagccatgcagctctgggaaaccacggatccttcttggaccccacagaactggggtgggtggatctgccacataaatgtcctggctttctaggctcgtgattggtcctcctgactgtggagtcatgctcgctctctgctagggggaacctggcctctctctaaggcgttgggggtggcgcagcctcctttggtgcgcgggcgccggtgcatgtttacgtcggggcgcgggaactagcacacactggggcggggtcgccagggcgtgaggcttcagcaccacagacagcaatccgacagtccggtcgagggcgctgccggcgaggtagcccagaccccctaactggagagcggcagtccccacccaatcctcgttcctgcacgccctttaggctccagactgtcagagagcgccaccagcgaggagagcctaatttgcccaatcaggggcggcccttgagataaccagttactggaagatgccctagagatcgagccaatgggagtgcgcgcaccaggggatgctgccacgcctggaaagggcaggccaatcgcagtggcccgcgcaataggggcggtggcggtgcagatccccgggtggcccctcttgggctcgccggggcgacctggctgcgggcgctaggggccccaagcgatggtctgttccccaccccgtgttcctcccggtttccgtcatcggaaactgagctaggaggggggctgctcctgggcgcgcggaccccgctgcggttcccatggaaacctgccggctccggcagtgcggggagagtggaggggacctgcctcgcggggggagggagctcgcgggggcggccccagcggccggactcgctcatccttgccgattcttctgtccccggctggggtagccccccggtccgcagcaggaactgaggcatagctggggccccgcctcatcccccgaactggtgaggaaccggcggggccaatctgcgcgtggcgccacagggctcccccgggcacgtgcctgagctcgcggctgcggtccccagggtcacgtggctgcggccaccagggcctacgcgcctcgcacgccacctagcggccgcgcctcgctccccgcccctctctctagcggcccgcaggaggcggcggcctcagcatcctcctccgggaaatggggccagggcagccgccgccaactccccttccccccgcggcttcctgttttaggaacacgccgagctagttctacctcggggttttggcactggttgttcctctggcctgagaatttcctcccccagctttcttctgggatagatctttgtcattctggtctatgcgcaaatgccacctcctcagaggccctccctgaccaccgacctaaacagcatccccggaaaacaacgcatcactctctcttttgcatggcgcttgtcgctagctgcaaatgtttctcattttaggggtttactgaacacctccccatctcatcccggagctcactgagggtgggagatgggtgccccataaaacaggaggaagtggaaattagggtcctgagttccgggagatgcccagagaccccagacccccaagcctcaccccatcctgtgggagcaggggctgtgcgaggctgctgggcccaggggcatccctcgttccctgcctcgcttaggaagggatcaagtaggctggagacagagaggggcctggcaccccaaatcattcaggcctaggggaagggcatctcctttctcgctctttaatctcactctgctctcttgacacagttccagcaatgcagccccaggcaccagctccgagaaggatgcggtggggcggggtggggaacctgcccagggggcccagctctggggcggggcgggggcgcctccttccggcccgcggtccgggcggccctcgcagctgtccaggccccggcaagcccgggcgtggtgtccgagcggacgaataaataggggcggtcagtggtcaggtgggtcaggtgggcttgtgatccgggtggcttttgagcgtgtggaacttgacgctgtccagcttctcgaagcgcttcccgcagcgatcgcacgtgaagttgtactgcacctccgcagtgtgcttcttcatgtgccagttgagcgacgcgcgctgccggcactggtagccacagatctcgcacctgccgggagcccgtggcgggacggggcggggtcagagtgggcggggcggggcggggccctacaaggccgagcgcaggtggaaccgggcccagacactgcgttggggcgaagccgcccctgggacctgctgggatcccctcccacccaatcctctagcggcacggggcggcctgtcactcactgcaggggggtctcgccggtgtgggtgcgccgatgtacctccaggtggttcttcctcttgaaggacttgccgcaggtctcgcaggtgaattcacggacacctgggggcggtggggaccgaggctgaggacggtgggctatggggtgtctctgatgtgctgcagactctgatgctagaaggagcatcaggctgtctccttggatctcccaggactgcaggtgcaggccgaccaaaccctacgtccttcccgtgcatttgcccacagacgccatcaagcagaactgagatcgaacttgggtccctgagaggcatagggtgcacactaccaagccaacatgggtctgaatttgtcttgtgtgtgtgtatatatatattttgcgacggagtttcgctcttgttgcccaggctggagtgcaatggcccgatctcggcttaccgcaaccacaaccttggtctcgcgggttcaagcgattcttctgcctcagcctcctgagtagctgggattacaggcatgtgccaccaaccatgcccagctaattttgtatttttagtagagacggggtttctctatgttggtcaggctggtctcgaactcctgacctcaggtgatctgcccacctcagcctcccaaagggctgggattaccaccacgcccggccttgtccctgatatttgaactttgggtgatttcgcaaaatgaaaacaaaaacaaaaacaaaaaaaacttctgcccagcacggtggctcacacctataatcccagcacttagggaggccaaggtgggcagatcgcctgagatcaggagttggagacaagcctggctaacatggcgaaaccctgtccctactaaaaaaaaaaaattagctggcatggtggtgagcgcctgtaatcccagatacttgggaggctggggcagaagaattgcttgaacccgggaggcagaggctgcagtgagccaagatcggattccagcccgggcaacagagtgagactctgttgcaaaaaataaccacacacacattaaaaaaaaccaaaaaaaacaaaaaaaacccccaaacttctgacctcctgtgatatcagaagctctggccctcagggcatgccctatcgctggacacaggcaccatggctctccactatgtccccagcccatgcagaagacctgcatctctgccacaagtggaaacagaagcccagtcccaagccagctgctcctctttgcccagctctccttcctgctgctgcttgggtgggcactggtctagcctgtggccccaggtgctgctataggttccaatctggaagagcagtggcggtgtcagctgctccctaagtctcgcatgagacctgctcttgggatcatggggcatggggtcgcggggataggagggaagatggccagccccacccaattcctgtgattgattggtaatagttcctgtcgctgtggctcacatagctacagcttactgaggacagggaggaggctcctaggggtgtagtcctgtgcccggagacccagcactgggctttgacccgccagctctggcccaggctcccaggcccatgtccctgtgtcccccgctcatgctgccagctggcccagggcctgacctgaatggatgatcatgtgccgccgcaggtggttggataaatagaacttcttgccacagccaggatgagggcacactttggtctttcctttccgatgcacaagattgacgtggttctggagacgagacaggcagaagtgggtcccataggcccacagaaggggctctgggaggtggggagagatgagggcagctggaaggcaggctggggctggcctccccaggaggagggaagaggggtacccttgcccagctcagagattcccaggggcacaactggggtcaaagggtagctttattttttttattttttgagatggagtcttgctctgtcgcccaggctggagtgcagtggtgttctctcagctcactgcaagctccacccccccgggttcacaccattctcctgccacagcctcctgagtagctgggagtacaggcgcccgccaccacgcccggctgctattatttttttctgtattttttagtacagacagggtttcaccgtgttaaccaggatggtctcgatctcctgacctcgtgatccgcccacctcggcctcccaaagtgctgggattacaggtgtgagccaccgcacctggccaagggcagctttattgaacacctactatatgccaggctctggactggggtatctgtcaactctgtgaagggcccagctgttagcccaattaatcgatggggaaactgaggttcaaggctctgtggtttggccaaggtctcacaggtggccagtggcaggactgggactggatttgagggctatcagcctctgtgggcctggaacaggcagccccaattgattcattcctttgttccttcactctttaacttactagaacaaccctggctccagcttgcaggcctggcttgcactaagtgcttaatacatgctcaatcaatgcatggcatggcacaaaggcctgttgttgcatcctcccatgccaggtcctggggtgtgacaagtccctgtctttgccttcagggacacctcgtcaaatttcaaggggcaaactagaggtaggacatcctggtggtgccatggcctgggccttgtgggcctggcccaggctgctccgggtggcggcctcacctggaagctgctgagggccacgtagacttggctgcagccctcgtatgggcagtggaacatctcgagcaggccgtcagcatccatcacccgcgaccgcttgctccgccgcctcctggaggggaaggggccatgacatcggggctcccgcaccaggcaggctgggggcctgcgggccgcttctagccctcgccctcacccttgcccgccccggcacccacttctcaggctccttggggatttcatagatgatggctgacatgtcgctgccgtccagctcctccccgtccgcctctgcctcaggctctgcgctctcaggcaccgttgttgccagctccggggctactggctcctccttctcctccttctttagcaagcacaggtcctccttctctacagggtggacacagggtggtgtccgcaggggacgaaggctgccgaggtgcccacttcgagggccattcctcgcccggcccctcccaggcccaaccacccctggccagaggccacgacaggtcccccagacctttcttggtctcgatgcctgctactgcggtggcgtccatggtgctaggctggctaccctcgggctctgtctgggtgtaggctgccacaccctccatcatggcacagggcacctcctcgcccagtccactgccggggacaccgctgcctgctgccatgttgaggtgaatgccctcggccgtgagagcgtcgtaaccagggcccgcaatgatgatcacctgtgagccgggcaccatgcctggcatggggcagctggccaccacctcacccagggcctcctggggcacgttctcaaagagggcgctggggcccgcacccacttgcacaggcaccggcacgcacaccactgtctccagggcttcaggcccattgcctgctgggttggagcacagcggggtaccctgctcggccaggctttccacgtggtggacgtcaaagggaatgtgcacgccctcctgagtgatgagcccgctgctgcccaccgggctggtgggcgtcgctgccgctgccgctgccgcagccttgaccggctggccctcaggagactcctcagagtcagaggcagagccagagctggatgagtcagagctgccagccaccagcccattgcccactgtggggacagaagaaagggagtggttatgatagctgcagccactggtatttgtttatttagtttttattttattttatttatttatttatttatttttttgagacagagtctcactctgtcacccaggctggagtgcagtggtgcgatctcagctcactgcaaccttggcatccccggttccagtgattctcctgcctcaggctcccgagtagctgggactacaggtgtgcgccaccacacctggctttttttttttttcctgagatggagtctcactctgtcacccaggctggagtgcagtggcgcgatctctgctcactacaagctctgcctcccaggttcatgccattctcccacctcagcctcccgagtagctgggactacaggcatgtgccgccatgcccggctaatgttttgtatttttaatagagataggggttcaccaggatggtctcgatctcctgacctcgtgatccacccacctctgcctcccaaagtgctgggattacaggtgtgagccaccgcgcctggcccacacccggctaatttttgtatttttagtagagacggggtttcatcatgttggccaggctggtctcaaactcctgacctcaagtcatctgcccgcctcagcctcccaaagtgttagaatgacagtcatgagccaccgtgcctggctgaatttttcttttcttttctttttttttttgagatggagtctcgctctgtcacacaggctggagtgcagtggcgcaatattggctcactgcaagctccgcttcccaggttcacaccattctcctgcctcagcctcccgagtagctgggactacaggcaaccgccaccacgcccagctaatttttgtatttttagtagagatggagtttcactgtgttagccaggatggtctcgatctcctgaccttatgatccgcccacctcggcctccgaaagtgctgggattacaggcatgagccaccgcatccggcctgagtttttcttttttttttttgagacagagtttcgttctgtcacccaggctggagtgcaatggtgcaatcttggctcactgtaacctctgcctcctgggttcaagcgattctcctgcctcagcctcctgagtagctgggattacaggcgtgcaccaccacacctggctaatttgtgtgtttttagtagagatgaggttttgccatgttggccaggctagcctcaaactcctgaccttgggtgatccatccacctcggctccccaaagtgctagaattatagtcatgagccaccacatctggcccgattttgtttttgttttgagatggagtctccctctgtcacccaggctggagtgcagtggtgcgatccgggctcactgcaacctctacctcccaggttcaagcaactcttgtgcctcagcctcctgagtaaatgggattacaggtgcatgcaaccacacctggctaatttttgtatttttagtagagacgggattccccattttggccaggctgatctcgaacttctgacctcaggtgatctgcccgcccgggcctcccaaagtgctggaattacagacatgaggcacctcgtgtggccctgattttcccaagtagagatcaggtcttgttatgctacccaggctgtggccttgaactcctgggctccagtgatcctcccacctcagcctcccaaagtgctgggattacaggcgggagccaccatgcccggccagcagttggtatttgttgagggctcttcaggggctagacactgtgaccctctcactgcttaaaacagcagtcacttctcaatccccactgtccctaactgttccaagatgactgacccagctgaccacccctactccaggggacactctcctctcttagcccccagacccacgctgtggtatcctgggcccttcctggtggctccttccaagtttatttggttcttgcaggcctggaaggcttggcctggggcctctcctcagcgctcaccttacccccaggcttgcccaggctaatggggttaaaggccaccctccgattctcgatgccaactgaatgtccaataattcaatccaatctgacattatcttcccggagtgggcgtcaaatcctccaagttaaaggctcagtcccacaagaccgccggacttcagatgtcagctgcaagtcctgggctaccctgtatgtctgaccaatgggctctaaatggggggtttccatgaccccatcctcaggtttgataatttgttagaacaactcacagaactcagaaaatggctctacctacaattacagctttattacaaaggattcaactcagcgacagccaaagggaagagatgcacagggcaagatacgggggtatggtatgggcttccatgccctctccgggggtaccaccgtcccagcatctcaatctggaactgttcaccaatctgggactgttcaagagggtttttgttgttctgttgttgttgttgtttgtttttttgagacagagccttgctctgttgtgtaagctgtagtgaagtggcacaatctcggctcactgcaacctccgcctcccaggtttaaaaaattctcctgcctcagcctcctgagtagctgggactacaggcacacgccaccatgtcaggctaatttttttttttgtatttttagtagagatgggttttcatcatgttggtcaggctggtctggaactcctgacctcaggtgatctgcccgccttggcctcccaaagtgctgggattacaggtgtgagccaccgcgactggccaagtatgtattcttattactacaaccatccatggcctggtgattccatctgcagcttctgcctacacctccatgtcgagctccagattcttccatctcattggccccctaagagtgtctcacaggcatctcaaactcagatctgcaacactgggctctgtatcttcccttctacaaagcctgcactgctcacgggtgtccctgactcagcggaaggcagctcagtctctccagtggctcaggccaaagtcctggggctcttgttgacttctctctctctcacacccacttccaatctgtcagcaaaacctgttggtgctgcatccaaaatacatccacccgcagcctgaacgcttctcccacttcccctgcagatgctagttgcggccccaccggccccctgccagggccagtgcagtcccttcttttgggtccccggctcctaagaacctactctttacctcctgtgaaagaagcaggccagctactcactaaatccctctcttcctggcaccagcaccgactacatttcccagcatctcttgcaggtaggtgtggccatgtggctgagtcccagccaatggaatgcaagtggacaggtgctcccaaggttgagtctccacttttctccccaccagtaagccaggacccacaaggaggctggagccataggaaggaaagaacctgggtccagggatgaaaggcagtctgcaggatggaagcaccaggctttgtatgtgggaaacaaaccactgtgccaggtcacgagagctggagtgcgtctgtttcaggaggtgttccatcacctcctgtcctcgcctcctctcctaatgtccttggagacactagataggttcctgcctcaaggcctttgcacctgccattccctcggcttgaatcctctttttttttttgagatggagtctcgctctgtcgcccaggctggagtgcagtggcacgatcttggctcactgcaagctctgcctcccaggttcacaccattctcctgcctcagcctcccaagtagctgggactacaggtgccgccaccacgcccagctaatttttagtagagacagggtttcaccgtgttagccaggatggtctcgatctcctgacctcatgatccgcccacctcggcctcccaaagtgctgggattacagacgtgagccaccgcacccggccggcttgaatcctcttctgtctgacacctgagagggctcctccctcccctccatcagatccttcattaaaggtattttttcagggggaatttcctgaccattctgtctcaaatagttcctttttccctcctttattttttcccaaagcacataccaccttacagtgcactctatattttattttatttttgagatggagttttgctcgttacccaggctggagtgcaatggtgcagtctcggctcactgcaacctccaccttccaagttcaagtgattctcctgcctcagtctcctgagtagctgggattacaggcacaccccaccatgccccgccaatttttatatttttagtggagacaatgtttcaccatattggacaggctgcgaactcctgacctcaagtgatccactcaccttagcctcccaaagtgctgggattacaggcgtgagccaccacgcccagcctgtattttaattaatttatttttttgagacagtgtctccctctgtcacctaggctggaatgcactggcacagtcatagctcactgcagcctcgagctcctaggttcaagcgatcctcctgcttcggcctcctaaagcactgggagaggtgcaccaccatgcccagctaactttttcatttttttgctagagatggggtctcactatgttgcccaggctgttctctaagccgtggcctcaagcaatcctaacttggcttcccaaagcactgggattacaggcttgagccactgtgcccagcctgcactctatatttttattggtttatcctgcttacaatccgcttcccctctagaatgtaaactccgtaaggttgcggggtcccggtgcagagcccccagtgccgagaaggctgtgtggtgcacagtgagggctcgttccaataaatgaatcaatctctgctccctagtcttggctcactgcagcctctgcctcccgggttcaagtgattctgatgcttctgcctgccaagtagctggaagtacaggcacacaccaccacacctggctaattttttgtatttttagtagagaccgggttttgccatgttgcccaggctggtctcgaacttctagcctcaagtgatccacctgccttggcctcccaaagtgctgggctggcattacaggtgtgagccactgtacccggccctcgggagtgtttttttttttttctagacagagtcttgctctgttgcccaggctggaatgcagtggtgcgatcttggctcactgcaacctccgcctcctgggtttcagtgattctcctgcctcagcctcccaagtagctaggattacaggcatgcgccaccatgcccagctcatttttgtatttttagtagagatggggtttcaccatgttggccaggctggtcttgagctcctggtctcaagtgatccacctgcctcggcctcccaaagtgctgggattacaggtgtgagccaccgtgcccagcctttgttttgggtctttaatgagtaaatatgtataagggtttaggacagtaggagattaaaagtatgtaccctgtaagtttcctattattatctcagtgccattcagggcagtgagatgcccactgttgatggacctggggtggcagcagggttggggataaggaggatcagcccctctttctggataatttccccttgtcctgtattctgcagggtgggcaaactctctggcaccatccagaaggagggcgcagtgtcctaatgagtggagggaagggccagagcacgcgtctgggtccacctgactgcagcacctgctaagtttggctgaccccagacttctcctcaggtaatgacagcaccaacagaaatagccatgggcaaggcccggtggcatatgcctgtaatcccagcactttgggaggccaaggcaggaggattactagatcccaggagtttgagaccagcctgggcaacacagtgagatcccatctctacaaaaaatttaaaaatcagctggctgtggtggtgtgtgcctgtgttcccagctactcaggaggccagggtgggaggatcacttgagcccaggaattggaggctgaagtgagctatgatggcaccactgcactccagcctgggcaaccgtgagaccctgtcttaaaaaaaataaataaaaataaaaagccaggtatggtggctcacaccagtaatcccagcacttagggaggccgaggcaggaggatcacttgaggctgggagttcgagaccagcctggccaaagtggtgaaaacccacgtctactaaaaatacaaaaattagctgggcatggtggctcacgcctgtaatcccagctactagggaggctgaggtgagagaattgcttcaacctgggaggcagaggttgcagtgagccaagatcgcaccactgcactccagcttgggtgacagagacagaatctgtctcaaaaagataacataacataacataacataacataacataacataacataacataacataaaacataacataacataacataacataaggccgggtgcagtggctcacgcctgtaatcccagaactttggaaggccgaggtgggtggatcaactgaggtcaggagttcaagaccagccggccaacatggtgaaacccagtgtctactaaaaatacaaaaattagccaggtgtggtggcagatgcctgtaatcccagctactagggaggctgaggaaggagaatggctggaacctgaggcttggcttgcagtgagccgagatcgcgccattgcactccagcctgggcgacaagagcgagaccctgtctcagataaataaatacatacataaataaataataaaaagttgagttggggcgtaagtaagctgctctgggcaccacccacaccccagcctgacccatcaccaaatgggccagtcagatcactcctggggcttgggattccttgactgccaagtggggctgatgacaaggccatggggaagattcatggtggctctgggcagggccaggagtggcacacagtgagggggcagtaaaaggcagaggagggcggaatgcagatcatgggatggggcagccgagaggccactgcacgctgagagcctggccgacacttggtgggacggtcgttggcgggggcgcccacccggaacacctctcgcccccggcttcccctcggccagctgggatgccacctgctccgagatgccagccagcgcaggctcagccctggtgaccgccccaccctcagccctgacaggacgcctggcagtgtgccctacgctccttctccagccattgccgaacccctgaggctgccggcagccccctcaccactcaccggggccaactgagcctccctcactgagtccctgccccgtgggatgggaaggagagaggcagggaccgcgaaggtggggagggaggaggagaaaggggaatagaaggaaacaagagaaagagagagagggagatgagacagaaaatgaaagatcaaggaaggaggagacagaggcagctcaagggaggagaaatggggaacaggagggaaacagaatggagggggaaggcaagaaacgaagcctggaaaggcagaaggcaagagaatgcaactgggagccagagaaaatcgaaaaggaggtagcggccagcttagccagggctcaggagagcatcacagcctatgaagccataaggcctgggtggtttaggcggccgtttcgctgtgggggccgagccctgccccagcaggcctgcccccgccccagctgccaagccagggctcctgggccctcagccagccctgcctgggactggccttgggcacagattggcaaactgctccataaagagggactgcctccccactcaagctctgtaaggacgcaaagagggcaaggccacgaaggactcagcctggcccatcgtgtccctgctctgccccagtgccagagccagagccagagccactgtggctgctattctgtttgtgatgctagcctagggctcgtaagaagcccccagaaatgggcggccccctatgtgccctcgccctgcagacctacctttgtcactgtcagggtctgagtcgctgaggggcttcaggggcgaatgcaggtcctggaagtagcggtggccagcttcgcactgccacacggccgtggtgtacaggccaaaagtggggtctagctccgccaggtgcggctcgtacgggcagcggtgcttgtggtcctcgtaccagatcaccacgttcttcaggcagttcacgttgcgtcgccgccctatggacacagggccgaggagtgggtataagggacagggctcagcccatggtgacatggctgcctgaaccaccggggctttatgggtcccatgggtttggaggccctcctgagtaccatccaggcctgtacccagtttaaagggggaaactgaggctcagagaggagaggcaccccctggaggtaacggggactgttctattggcaaagtcatgtaaacagtggagcctggtgcacagtaggtgcataataattgttagctgcttgttaattgttctcatcttcatcaaacgcctagaccagcgcagtcctcaggcccaggactcccaggctcccgccctaaccaccccctacagccgcaagggggcgcctgtgaatgcccgagtcaagtctgttccctcctctgctcagaatccactgggccaggcgcaatgactcacacctgcaatcctagcactttgggaggcagaggcaggcggatcacttaaggccaggagtttgaaaccagcctggctaacatggcgaaaacccatctttactaaaaatacaaaaattggccggcatggtggtgtatgccttttgtcccagctacttgggaggctgaggtaggaggatcgcttgagcctgggaggtggaggatgcagtgagccaaggtcgcaacactgcactccagcctggatgacacagcaagaccaactccctcagggtaaaagccaaagtcctcccttcggcccacaaggcccactgtgacttgtcacctccccgccctcacccacttggtgactgcactccactccagccacatggcctcctcgctgttcctggagcgggctaggtgtggccctgcctcagggccttggcacaggctgtgcctgcttcctctagataactgtcttgctccctccccacttcactcaggtctcccccaaatgcatcccctccaagaggccactccctgcccagtcactctagccgaccttaactttgctgtctgttttctccaggtagtacctagatgccatctgtggccatttgtttacatgtgccctgtctgtctctcccaccagaatgtcagctcctcaagagcaggaacactgctgttttgctcctcctgtacccccagtgcccccaaagggcctggttcatagcaggtgctccaggaacatttgctggatgagagaacgctgcatagcgggcgggcatggtggagccggaccgcctgggtttgaatcctggctctgccccttccaagctgggtagctccaggcaagtgacttggcttctctgagccccaggtgcctcctctaggctggggagaataagggattcccatcccggagggctgccaggcaggaggaagggagtgaagacatcgccaggacacagaacaaggctgggcacacagtgagtgctgggaaatggtatctgactcttgtgatggtcctggtccctcagccaagtgcgaggacagcatgtcccccactcctaccctgtgggccgggagatgaagaggggcccagaagaggtgtttgggtctagggaatgtgctcacagtctccaatcatgagggcaacagagtcgtcacccacagccgcctctccggcccagccctttccctcctcaatgcgctcctcatcccttgaggattcaggatcaaggtcatagctcacccctgcctctggagaaacctaagaagggaggggctcactgccaccagctggccttcaccctgctggacatggcctgggacccccagctccagggctcagagctgtgcagaccctgacagttcaagctctcaccaactggtggccagcaggacaggaggagcaagctccagacctcccctctaaccaccagtgcttggctccccctgcccttagggctctgcaaaagctgttccctctgctcggctctcccctggctgactcccatgccgggagcaagagaatgagggagccaaggacactgcgcctgagacacaagacacgcagacccgggtttgaggtcgggctctgctggttccaactgtgctgcctagggcagcgacctggcctctctgggcctccatctccatattcccaccgctcccaactctccccacctcccccaggctgagcctccacttacttttcttccgctttggctttttggggacctgctcccaaggcttcctgcaacagaaagaggcagagagggtgaacgggggaccagcgctgggcctgtctgacccatgagtaacaacagtggctagagccactgctcattgtacactgaaactaaatctgaactttttgagatggagtctcactgtgttgcccaggctagagtgcagtggtgagatcttgactcattgcagcctttgcctcccaggttccagcgattctcctgcctcagcctctcaagtagctgggattacaggtgcacgccaccacacctggctaatttttgtatgtttagtagagacggagtttcaccatgttggccaggctggtctcgaactcctgacctcaggtgatccgcccacctcagcctcccaaagtgctggtattacaggcatgagccgccacgcctgccctgaacttttttttctttttgagacaatgtctgtctctgttgcctaggctggagtgcagtggtgcgatctcggttcactgcaacctccgcctcccaggttcaagtgattctcctgcctcagactcctgaatagctgggattacagactaattttgtatttttagtagagacggggtttcaccatgttggccatcctggtctcaagcttctgacctcaggtgatccgcccacctcggcctcccaaagtgttgggattacaggcgtgagccaccgtgcccagcctagaatctgaacttctatgtacctttccccaactccagaactgtgtcaccaggcccctcccttggactctctccccaattgccatcagccctgggagggggctctagcatcatccacctcaaggagcaggaaaaacaggcttggaggggtgaggccatctgccctgggtcccacagtcagggagcagagaagtaacaaagtgggtatgaaaagtttgtgtggaagcagaattccaagatggcccccacagttctgctgggacacatgccctgtgtgatcctcttcccctgagcggggcaggcctgtgagtaggactggatgtcaagccttggttaggtgactgtgagttaatcaaacgggaacatatcttgtagggcacagtggctcaagcctgtagtcccagctacttgagaggctgagagtggtcttggcccacagccagcaagacagtgggtactgtctgggtgtggtgtctcacacctgtaattctagcactttgggaggctgaggcaggaggactgcttgaagccaggggttcaagaccagcctgggcaacatagcaagatcccacctctatttatacaattaaaaaaaaaaaaaaaaaaggccaggctccgtggctcattcctgtaatctcagcacgttaggaggttaagacgggtgcatcgcttgaggccagaagttggagaccagcctgggaaacacagtgaaaccccatctccacaaaaaatacagaaattacccaggcggggtggcatgcacctgtagtcccagctactcaggaggttaaggtgggaggatcacctgagcctggggaggtcaaggctgcagtgagctatgatcacaccactgcactccaacctgggcaacagagtaaaaccgtgtctcaaaaacaaagaaacaaacaaaaacaaacaaaaaacgatcttcgtcatggtacagccctgtcacttaatcatcaataagcaaatggtacaatgatcgttatgattatcagtatcatcgtggagcctgggccccctggcctccctgctgtggcccagacctgctcttgccacaaacatcctgacagccagtctagtgtctcttatcagcaaaactgtccaccccgtctgactcctgcccagccctgtaacaattctcagtcccacacccgtctggttcccaggactgcaccttggggatcttccatctttcctgccccaggctctgcccctgcctctggctctgctactccaggtcccattccatgtgactctatcccttcccatggctccaccctcccctgcaaagcaccacactggctgtagagaccttcacccaacccaagacccaagtctggctctgtcacccaggttggagtggagtagcactatctcagttcactgcaacctctgcctcctgggttcaagcgattcttctgcctcagcctcctgagtagctgggattatagatgcctgccatcagcccagctaatttttctatttttagtagagacaggatttcgctatgttggccagactggtctcgaactcctgacctcaagtgatctgcctgcctcagcctcccaaagtgctgggattacaagtgtaagccaccatgccctgccccaaacccaagtcctgatgtccacagccacctccatccactcaccgctggaggctgggagtgtcacattgcagtggggacagtcttgggtatcagccagacccaagttcaagactcagctctgctctcaactgcctgtgtgacctcaagcaggtcttgtcccctctgagcctcagtctccgtctgtgaagtggaaatagtagtagtgcttctgacacagggtcaccatggggaccaaacaaggtcatatgtaacctggtgagcgccactttccaacccccacacagggctttctccctcaaactgccttccctctcctgtccacttctccaacttctgccacttctctgtgactcccagcagaggccactggcatcaaggaccacagctccggggctactcaggccctggcttggctgtttcccgccatttcctttcagtcttcagtcattcccaccagcatctaaatatgccatgatttctcccatcttgggttaaaatcattttgatacccaccttccccaccagccccttccccatatctttttttttttttttctttttgagacaggctctcgtggtgttgccccagctggagtgcagtggcgccatcacagctcactgaagcttcgacctccagggctcaaccgatcctcttgcctcagcctcctgagtagctgggaccacaggcatgcaccaccacacccggctaacttttgtactttttgtagagatcgagtttcgccatgttgcccaagctggtctcaaactcctgggctcaagagatccttctgcttcagcctcccaaagtgctgggattacaggtgtgagccactagcacccagcctccttcttcatttccccgttttgtcacagttgtctacactcgctgtctccatgtcctctcctccatctcactggaactcctccagtcagagctttgctccatcacgtcacacactctcccatcacagtcaccagtgacggcttcactcggcccaacagcactggacatggcagacacttcctttggcctcctgggtgctgccactgcccagtgctccactggcaccgggctgctgcttctccctcacctcccttaccaaggagagcaaccgccacactcaggcctgtgttttctgtctaaaagtatccctttagtaacttttttttttcttttgagatagagcctcgctctgttgcccaggctggagtgcggtggcacgatcttggctcactgcaaactctgcctcctgggttcaagtgattctcctgcctcagcctcctgcgtagctgggactataggcgtgtgccaccacgcccagctaatttttgtatttttagtagagacggggtttcaatatgctggccaggctggtctcgaactccttacttcgtgatttgctcaccttggcctcccaaagtgctgggattataggcgtgagccatcgcgcctggcctatttttattttactttttgagacagtcttgctctattgcccaggctggagtacagtggcgcgatctcggctcactgcaacctccacctcccgggttccagtgattctcctgcctcagcctcccaagcagctgcgactacaggcgtgcgccaccatgcccggctaatttttgcatttttagtagagacagggttttggcctattggtcaggctggtctcaaattcctgacctcaagagatccacctgccttggcctcccaaagtgctgggattacaggcgtgagctaccatgcctggtcttccttttttttattttaattgttgacaagagtcatgaacctccttggactcatcatcagctttaacaattgttaactcttggccaaccttgtatcacaatgtgtaccccatccattcttcaagccacacacatcctagagacagtttcttctaaaatacaaaccaggctgtgtgtgacttgtagtcccagctactctggaggctgaggtgggaggatctcttgagtccaggagttcaagaccagcctgggcaatatagcaagactgcatctcaaaaataaataaacaaataaataaggaaataaaaggccaggcccaggcccgggtatggtttcatctttacatttaaatctgcaaccccgccgggcgcagtggctcacacctgtaatcccagcactttgggaggccgaggcaggcagacctcttgaggtcaggagttcgagaccagcctagccaacatggcgaaaccccgtctctactaaaaatacaaaaattagccgggcatgggggtgcacgcctgtaatcccagctactcgggaggctgaggcaggagaatcgcttgaacgcgggaggcagaggttgcagtgagctgaggctgcgccaatgtactccagcctgggtaacagagcaagactccatctcaaaaaaaaaaaaggtggggggggcatcaggggaaataaaggcagaccataccacttctttctctgtacaaaatcttgcacttaagaaaaggctcccacctcactgggaggaaaaactggagtcctctccatggctctggatgaccttccctgtcaccaatctgtccttgtcttcccttctccccctcactcattgcagtccagccacacaagcctcttcagtgttcctggcacacaataggcagggtcctgcctcaggacctttgcctttgctattccctctgcctcaactcttccccagagatctgcatggctcctcctaggttccttcatgtctttactgaaatgctatcttctgaatgtgaccaccttaactccctatttaaacttccaactcacactcttcatttcacttttgttttttccgtagcccctatctctcatggacgatacaatttacttatgtttctggtctgcagtaaacaagccttttgccaggtatggtggctcatgactttaatcccagcacttcgggaggctgaggacggaggatcccttgagccgaggagttcgtgaccagcctgggcaacatggcgagacccccatctccatgaaaaattaaaaaattagccaggtgaggtggctcctctgtagtcccagctacttgggagactgaggcaggaggatcccttgagcctgggaggttgaggctgctgtgagctatgaacatgccactgtactctggcctgggtgacaaagtgagaccctgtctcaagaacaaacaaacagggctgggcacaatggcttacacctgtaatcccagcactttgagaggctgaggccggagaatcacttgagcctaggagtttgaaatcagcctgggcaacacagggaaacctctgtctctacaaaaaatacaaaaattagccaggtggagtgacgtgcacctgtggtcccaactactcaggaggcggaggtaagaggatcacttgaacccacgaggttgaggctgcagtaagccgtgatcatgccactgcattccactctgggcgagagagtgagaccctgtctcaaaaagaaaaacgagggccgggcgcggtggctcacgcctgtaatcccagcactttgggaggccgaggcgggtggatcacgaggtcaggagatcgaggccatcctggctaacagagtaaaaccctgtctctactaaaaatacaaaaaattagccgggcgtggtggcgggcggctgcagtcccagctacttgggaggctgaggcaggagaatggcgtgaacccgggaggcggagcttgcagtgaacggagatcgtgccactgcactccagcctgggcgacagagcaagactctgtctcaaaaaaaaagaaaagaaaagaaaaacgaacaaaaaaaccccccagacctttgaacaagccatcccctctgcccaccagaatgtccgctccatgaggcaggtatctttgcgctcccagcatttccagtcctgctcttgagcatataagccagcctgctgtcctgggaaaggggtgggtataacttagcaggatctgtttgattcttgactctcagaatctccccccagagaaacatgagaacatgtgtacctgaaaaccagggcagaacaaggatttccttgcggcactgcttgtgatacggaataaacgtcatcctcgtaaaagttaatacttagggaacccactacctgccaggcactcttctaagctctttgcctattttaactcaatcatcacatcaacatataaggcaggaagggaaaaactccatccacactgctccttctcaagactgagaatttacaaagacaggcctctctgccctccacctgccaagctaactaggggtttcctcttcatccgagtctccctgggctgagttgcttcacagaaataggtttaggggagtgcagtccaggttgtgaagggtcccccggatgtgttggatctagggttgtgggaatggggccatacggagtcccagatggggcaccagaacttcaagaagggcagggctgagtgccccagggtgtccagagtcccaggccaggtggggaactaagcgggggaggatgagaccggtgagggggcggggctgcccccccagggcctggttagttacaaggcctggaggtggggccagtcccaggattgggccgccagagttctagcgggcggggccaagcgctcagaaggcgggtcgaggggctgggtgcaccctaggattgggcagtcggaacgatgggaggcggggccacgagccaggcgcgtcccggccaggcagtacgagacccaggccgccggcccggctcctgggcggggtccgcaggtgccgggggctggccctagaagcggagggggcggggtaaagcccggcggggtctgggggcgtctcctccctccctccctcggggccaggccccctcacccgtggcggccgctccgctggccgcgctccagagagatgaggtaggcggcgagcttggcgtcgctccagccgctgcggcgccgcaggtccacccagggcccgtgcgcctcgcccaggtacacgcgccgcacgtcgtacttcttccgggactcgagccgtcgccgggcccggtccgactccgtgagtcgcggccggccccgcgcctttcggcccgctgcgccctcctcggctgctgcctccccgcccgcgcccgcctcagcctccgcctccgcctcgggctctagcgcccgctccgccatcccccccaccctggttaccagcctcccccgttgttaggagccagaccggaagtggcgcgcatcttcggcgccgccgagaaatttctcacggtctctcgctgccccagggcgccaaaaggagaccaagaatggaaactgcgcatgcgcacaaccaacagcgctcccgcccctttttatttgaattcggagaaccagaggcgcctgcagattctggaggggtctcgcctgcccatcgctggcagcccgagatcctggggaggggatgccatactgctagagatgagggaagagagccccaagcaggaaaacattgatttgctgtacactcaaagggcatctcatgccttcagtccaccgcctcctcgggccacagcccgtgccctcgcgccggctcagactagctctggccctgctgctgtcgctgcaggttgtcgtcttcttcctggtggtcctcgggcaggggcggctcctccagccctgcagaggatgtctggagctcccgggtggacccggcgaggcggaagaccacggggatctgggccagggttgggttggtctcctgcaggccctggatccacttagccatcgtcgcctggtcatgagcacccgccatgcacatggcgaagacagggccttcctccactgttggaagacatgcacccttaaggtttgcacagtgggggctgcagcggctaacccatgcctacacctttttgaggtattttacactcccttccacttcctttttttttttttttttttttttgagacggagtctcgctgtgtcacccaggctggagtgcagtggcgagatctcggctcactgcaacatccgcctcccaggttcaagtgattctcctgcctcggcctcccgaggagctgggattacaggtgcacagcaccacgccgggctaatttttaaatttttagtagagatggggtttcaccatgttggccaggctggtctcgaattcctgacctcaaatgatctacccgcctcagcctcccagagtgctgggattacaggcgtgagccactgtgcccggcttccttccactttcttgtgcctccaaacctttgcacaagctagccccgctgcctaggctgcccactccacacttcacccgggcgatgactcctggtttttctgtattctgccaggaaggcctcctgaccccccactcaaggcatgctcctctcctaagctccccaaagtgtaatttgcctgttcccttgctgactcgagggactaggtttgtcctggtgacacccagtagccagcacagagttgtaggagggagggaatgaacaagggccaacagggctgggtgacctcaggtctggagcccctggggcaaatgagtgtgtgcggccggaggacgagggtgtaagtggactgcgtctcagcctgggcctaccccttgaccccagaggccgcccctcatcctgggtggtgtttggaatgtttggaagtcctgcctgtccaggtttttgccttttttttttttttttttgacacagggtctatcatgtaggctggagtgcagtggctctataatagttcactgcaacctcaactcctgggctcaagtgatcctcccacctcagcctgtaggagggctgggattacgagcacacatgtgagccaccgcacctggcccagtttttaccttcattgatgtcaaactcgtagttgtcccagccactcctcacatactccaggtccagctgcatcgggtagtagaggttccactcctccggcgtctcttccacttcctactccaaggtggggagtgcaggcggggtcagaggccagggctctctcggtctccctcctccagcctctcccatgcaccctcagggtagtgccagcccactccccagccccaacacatgctttgctttaagccctcaccctctcctccgggggcagcaagtcagctctgaggatgtggtaatacacacacttgttgcggagccacagggagaaggggccctcaacaaagacaggccgggctggattgtggcgggccagggcggcctgctgatcgggactctggattcctggtgtggagacatacatgccctgtgccctgcaagggactcggcccagaggcccagggagcccagcctaggcccagcgagaacctggcagggcctgggtaaggttagagacttggctgcccccatgctctcggacttacctacgatgtggggctgggggggatctgctgcacctgttgagtctttgggcaaaggaacctgcaagggagagtagggatataatcttgtaacccccaatcccctacagaggaactggggacagagaaacagaaagggggataccagggaattcaggacacctctcctggatctggtacacggccctccaacctgtcccctcctccctctgtcccatttggcaataaccaccaatctttaggatgctcaccctgagggaactaccctagaaccagcccacctttgtcaaaatcctggctctgtcacaagctgtgtgaccttggccaagtcactgtacctgtgtgcctcagtttctccagatgcacaatagggatgataacagcacttaattccgattttttttttttttttagggatgggggtctccctctctgtcatccatgctggagaatggtggcatgatcatagctcactgtagccttgaactcctgggctcaagtgatcttcctacctcagtctcccaagtagctgggtctacaggtgcacaccactatgcctggctaattttatttttttaatttttgaaatggagttttgctcattacccaggctggagtgcaatggcatgatctcggctcactatagcctccgcctcctgggttcaagcgattctcctgcgtcggcctcccaagtagctgggactacaggcgcctgccaccatgcccggctaattttttgtatttttagtagagatagggttttgctatgttggcctggctggtctcaaattcctggcctcaggtgatccgcctgccttggcctcccaaagcactaggattatgggcatgaacctaactttgggtggttgtaaaatatgtagcacagtccctggcaaataataagtgctcagtgcttgtgaattaaaaaaagaaaaataacttcacatatacagaatatcccaggaaggagacactagaagcaaatgatagctttcacctctgtggaggacagggtgggaaggaataccttttttatcttttaaaattttataccttgaacataattcaaaaacactagacaattttttttttttttttttgggacagagtttcgctcttgttgcctaggctggagtgcaatggggcttgatctcagctcaccgcaacctccacctcctgggttcaagtgattctgctgcctcagcctcccgagtagctgggattacaggcatgcaccaccacgtctggctaatgtctgtatttttagtagagacagggtttctccatgttggtcaggctggtctcaaactcccaacctcaggtgatccacctgcctcagcctcccaaagcattgggattacaggcataagccactgcgccccgctgacaaagtttttttttttttaacaaaatgcacttgcttttgaaacaaaacagtggacagctattagaacatatatcattcatcctttcaagttaaaaaaaattgagatgagcaggccgggcgcagtggctcatgcctgtaatcccagcactttgggaggccgagggtggtggatcacttgaggccaggagttcaagaccagcctggccaacatggtgaaaccccgtctctactagaaatacaaaaattagccaggcgtggtggcacacgcctgtagtccctgctacatgggaggctgaggcacaagaattgcttgaacctgggaggaggaggttgtagtgagccgagattgtgccactgcactccagcatgggcgacagagcaaggctctgtctcaaaaaaacaacaaaaaaatttgagatggatcagtgacttctagttgtattaaatgaaatttgtaaaaggcaaggtacatgtatataatgccctgctactaaagaaacttttttttttttgagatggagtttcgctcttgttgcccaggctggagtgcaatggcgcgatctcggctcactgcaacctccacctcctgggttcaagtgattctcctgcctcaccctcgcaagtagctaggattacaggcatgcaccaccatgcctggataattctttttgtatttttagtagagacgaggtttctccatgttggtcaggctggtctcgaactcccaacctctggtgatctgcctgcctcggccttccaaagtgctgggattacaggcgtaagccaccatgcctggctaaagaacttcttttttttaaacagacaggatcttgctctgtcacccagtctggtgtgcagtggtatgatcacggctcactacagacttgacttcctgagttcaagccaccctcctgcctcagcctcctgagtagctggggctacaggtgtgcaccaccactcccagctaattttcgtatttttttggtagagatggggtcttgccatgttgcccaggctggtctcgaactcctgggctcaagcaatccatctgcctcagcctcccaaagtgctgggattacaggcatgagccactgtgcctggctgtattttactccataagacgggggagaaggatatttaaatacaaaggatacagatgccaaaaaaaaaaagagagagagagagagagatctgcttgcaaatgtatagaacctctctggaaggagacatggaaatagtcacctctggggagggagacgggcggcgtcaggggcagcgcacggggcctgggtagaagcagaggactcgtcactgtgtgcttttacatgctgtttggctttttagtgcattgctttgcaaaatgaagaaatgaactaaaaacaaccctcccccccacattctgctgctggtctcaagccatctctcacctggacccacgaccctggtcccctagcccctctccccatccaacagcatccacacggctgccaggagacacgtttccaattgcagattcttccagaaacatgattccaacccgattccttcttcttaaatctctgcccccccacccccggcatagctctccccaccaaccaagaggtttgagatcaagctctttaatcaggtgcccccactcactgcaccgcatttcctggtacacactgctccctctgcccagcgtcctctgctctccttacctcccccaggaagccccacctgcccactcggctcccacagcaccccgggcttctccatctcagaaccactggctcttaaggaaactgttatctgtccaggaccacatgacaagtgctgtgaggggctctctttggatcccttgtgtgatctggcatgagtgggggctcccaggacactgagttgagggtgttactccactcagtcattcaacaaaccactgccaagtgtcagctttgcaccaaatcctgtgctcagccttgggagacaggagggagactgagtcatggtgaatgaggaaccaagccaagcacggtgaaggggtggtgccttggccagggaggtcaggaagggcatcctgattaggaacagtggagctgagaccggaataacatgaagtccatggggaacagtgttcctggcagaaggaacagagaacgcaaagccctgtggtgagaattggcacagaaaataaggaagatgcctagaatgtagcaagtgttgggagaaggatgggagggtgctatggtctgaatgtttatggccccctgaaattcatatgttgcaatctatctacaatgcaataggattaagaggtcaggcctttgagaggagaggcacttagatcataagggctctgccttcatgaatgagattagtccccttataaaaaaggtcttggccgggcacagtggctcacgcgtgtaatcccagcactttgggaggccgaggtgggcagatcatgaggtcaggagatcaagaccagcctggccaacatggtaaaaccccgtttctactaaaaatacaaaaattagctgggcctggtggtgcatgcctgtaatcccagctacttgggaggctgaggcaggagaatcgcttgaacccgggagtcagagttgcagtgagctgagatggcgccacagcactccagcctggcgacagagcgagactccatctcaaaaaaaaaacaaacaaacaaaggtctgagggggccaggcatggtggctcatgcttgcaatcccagtactttgggaggctaaggtgggtggatcgcttgagctcacgagtttgagaccagcctgggcaacatggtggaaccccatttctacaagaaatacaaaaattagccgggcgtggtggtgtacgactgtagtcccagctacttgggaggctgaggtgaaaggatggcttcagcctgggaggtggaatttgccgtgagccaagatagtgctactgcgctccagcctgggcaacagagccagaccttgtctcaaaaaaaatatgaagaggtctgaggggcttgtttgccccttatattatgtgaggacacagcaaggtgtcatctttgaagcagagagcaaaccctcaccagacctagatctggtggcaccttgatcttggacttcccagcctctagaactgtgagcaataaatttttgttgttcatcaatgacccaagctaagagattttgttagagcagcctgaacggactgaagcagaggtcactcaagctgtgctagcagtaaggaccatgggaacctaccaggggactcagccagagaatcagaactcaattcacggccaggcacagtgcctcatgcctgtaatcccagcactttgggaggccgaggcaggaggattgcttgagcccaggagttcaaggccagcctgggcaatatagtgagaccctgtctctgaaaaaaaaaaacagtttttttaattagccaggcatagtggtgtgtgactggagtcccagctactcaggaggctgaggtggaaagatcgcttgagcctgggaggcagaggctgcagtgagccgagatagtgccaccacactccagcctgggcaacagagcaagaccctgtctcaaaaaagaacttgattcaccacaatcactagagtgagagaaggggagcccaggggaggaatggcgggagcctggcctggggtggcagctgacgctgtagacaagggcggatacctggtagatggtgaccctggcactaaggtcaggctccatgtgccgcaggccaaacatggccagctccacagggtcctggggcaggtcccggggcactgggaaggggttgacgttcatgaatcgagggaaccacagcttcaggcgcaccaacttgagcatggggtagcttttgcgtccaaagatctgaatcagcaggaactccgtctccttgttgggcatcacacctgtgctgggcagatgcaggcagaacctcagagatggagggggaggagggaagggaagaggagaaaagaaaacagtgaagtgagggaattgatcacagacagggagaaaagaatcagagagaattagaaagaaaaaggctcatgcctgtaatcccagcacattgggaggccaaggggagaggatcacttgagtccaggagtttgagagcagcctgggcaacatagtgagaccccatttctaaaagaaagagagaaagagaggaaggaagggagggagagagaggcagggaggagaggagaagagaggagagtggggggaggagagggagggaggggggaggggaggggaggtcagagggaggcaagaaagagagatgagtgatgaaaagagggattcggagagggagaagagcgagagagacagagacggagccatggaggaaggaggggctgagactcaggagaggtgctgccagctatcagtgtagcccactccccaccctgcgccagcctcctggcctcaccgtggttctccatctgctccaggacagcaatcccacactcctgctgccgagggtagtggacgaagatgcgctggatgatgttgcgaggccggaagacctccttggggaagatgttgagcagctggttgtacacagccaggtcccgctcgacaccatactcccgcatcttgcgcagggccaggtagatgaagtcaatgtggccccgcttacgcacgctgtgctccgcaaatttctgcaccgtctgcaggaagctcgccttgtcccgttccccaccaggcgcctgcccaaacaggtcctcaaagggcaccagagccttggtgggcctctgccggggttccggtgggctgggaaccagggactgttcagagctatgggcagctgcgctgcagtggaggccccgagggagccggcgagggacctggggagggaggagaactgctggaatctggcacctctcagtgtctatggggggccgccaggctggctctttcctcagagaggtcccagtggcctccctgaggactcggaggtatggaactgtggttacaaacccaagattcgaggccattacaaagtgcgataaaacacaatgctggcacagtagggaggaaacaggcactgttagccatggctacggggagctggtaaaaactgccacggaggcaacttggtaatattcacagtgatgacacacacatgccggtttttttttgggtttttttttttggtttttttttgagacggggtctggctctgtggcctaggctggaatgtagtggtgctactgtggcttactgcagctttcaactcctgggctcaagcaattctcctcctcaccctgtccagcagctggaactaccggtgtacaccaccacacctggctaatttttaaattttcagcagagacgggagtcgcactattttgcccaggttggtcttgaacgcctggcttcaagtgatcatcccgtctccacctcccaaagtgttgggattacagacatgagccactgtgcctggtggccctttttgcttgtaattttttttttttttttttagacagagtctcattctgtcacccatgctgcagcgcagtggcgtgacctcagcccactgcaacctctgcctcccatgttcaagcgattctcatgcctcagcctcccaagtaagctggactacagacgtgctccaccacgccctgctaatttttgtatttttagtaaagatggggtttcatcatgttggccaggctggtctcaaactccaggcctcaagtgatccacctgcctcagcctccccaagtctttttttttttttttttgagacagagtctcgctttgtcacccaggctggagtgcagtggcgcgatctcggctcattgcaagctccacctcccgggttcacgccattctcctgcctcagcctcctgagtagctgggactacaggcgcctgccaccacgcccagctaattttttggatttttagtagagacggggtttcactgtgttagtcaggatggtctcgatctcctgacctcgtgatccgcccgccttggcctcccaagtgctgggattacaggcatgagccaccgcgcccggcgtagccaccttaagtcttgagattacaggcatgagccactgtacccagccccttctttctttttctttttttcttgagacagagtttcactcgtcgcccaggctggaatgcaatggtgtcatctcagctcactgcaacctctgccttgtgggttcaagcgattctcctgcctcagcctcccaagtagctaggattacaggcgcctgccaccatgcccagctaatttttatgttttgtttgtttgtttttcctgagatggagtctcgctctgttgccaggctggagtgcagtcacacgatctcagctcactataacctctgactccctggttcaagcaattcttctgcctcagcctcccaagtagctgggattacaggcacatgccaccatgcccagttaacttttgtatttttagtagagacagggtttcaccatgttggccaggctggtcttgaactcctgaccttgtgatccgcccacctcggcctcccaaagtgctgggattacagatgtgagccaccatgcccggcctaatttttgtgtttttagtagagacggggtttcaccatgttggccaggatggtctcgaattcctgacctaaggtgatccacccaccgtggcctcccaaagtgctgggaccctttaagagatggagtctagctatgttgcccaggcgggagtgcagtggctattcacaggcatgagccaactggtcagcacaggagttttgacctgctgtttccaacctgggtcagttcacacttccttaggcaacctggtggtcccccaagtcccaggaggtcacaatattaagcaaaacttagtgcaggacactccatcagcatagtgcacaacagcccagaactcctgggctcaagtgatcctcccacctcagcctccagagtagccaaattctggttctagatgacacagtaacaaatttcttattttaaattgaatttttaaattagaagggttacatataaggcatcttaaaaatatacagctagttatcaaggttgtactgtgctttgattgcaccaccgcattgcagcctgggcaacatagtgagactccatctctctatgaaaaaataaaaaaataagcggggcgtggtggtgtatacctgtagtcccagctactcaggaggctgaagcaggaggactgcttaagcccaggaatcccaggctgcagtgagctatgattgtgtcactgcactccaacctgaacgagagagtaaaaccttatctctaaaaaataaatgaatgtgtgtgtgtttatctacacacacacacacacacacacaaaacgctaacaagtaagagccaatattagtccaggctcggtggctcacacctgtaatcctagcactttgggaggctgaggcgggcagatcacctgaggtcaggagtttgagaccagcctgggcaacctgctgaaacctcatgtctacaaaaaaatacaaaaattagccaggcatggtggtgaatgtatgtagtcccagctactcaggaggctgaagtaggcagatcaattgagactggcgggtcgaggttgcagtgagccaagatcacgccactacactccagcatgggcaacagagcgagaccctatctcaaaagaaagagacaatatttaccaaatattcttccactgtagacacagttgagcactttacaaatgtgaggccctaggtggggggtactcttactgcactcattttacagatgagaaaaaccaaggctcaggaagatgaagtgggatgcacagtgttacacagctgcaaagcatcagagctgagaatggagtcagtgccctcagtccccctactctgcggtccccacagccatcccatatcgttctttgataaggcaatgttaaaaaaaaaaaaaggcattcatttacagtaaaatttcaggttgggcgcagtggctcgtgcctgtaatcccagcacttttgagaggcgggtggatcacttgaggtcaggagtttgagaccagcctggccaacatggtgaaaccccatctctaccaaaaatgcaaaaattagccaggtgtggtgccgcacacctgtaatcccagctactcaggaggctgaggcaggaaaatcacttgaacccgggaggcagaggttgcaatgagctgagatcacgccactgcactccagcctgggtgacagagggagactccatctcaaaaacaaaaaacaactgaaatttcagtcaattaataatataggtggtgtagtattgtaccactttggggtaaaaatcagaaaggaagctctaaaatgcctaacgagggggaaacactgcaaaggaggtaatgtaaatgaaatgcatagtgcggggccgggcacagagtaagtgctcaatatgggaactattaatattcccaccatcatcgttattgctatctatggctgtcaatctgctttcgccatctggtcactatgggtataggaaagaaattcagttttctgccccatcttcacaagtagatgcaggaggagctgctcacagtcaccacacaaatccaccgagctcatacatccttattttcaaagtcaatcccctcacccacgtaggcactagcatctcttaaattagggtccaggcacagtggctcacacttgtaatcctagcactttgggaggccaaagtggaaggactgagggcccagaggttcaagaccagtctgggcaacacaacaagaccatatacttaaaaaaaaaaaaaattagcggccgggtgcggtggcttatgcctgtaatcccagcactctgggaggccgaggcgggtgaatcacctgaggtcaggagtttgagaccagcctcgccaacatggcaaaaccgcgtctctactaaaattacaaaaattagctgggcgtggtgatgtgcacttgtaatcacagctactcggcaggctgaggcaggagaatcacttgaacccaggaggcagaggttgcagtgagccaagaccacgccactgcactccagctttggcgacaagagcaaaattccatctaaaaaaaaaaaaattagctgggcatggtggctcaaatcagtgatcccagctactcagggggctgaggtgggaggctcatttgagcccaggagtttgaggctgcagtgagccctgattccaccactgtactccagcctgggtgatagagcaagaccttgtttcaaaaaaataaataaattatggacttttggccaggcgcggtggctcacgcctgtaatcccagcactttgggaggctgacgcaggtggatcacttgagcccagagttcaagaccagcctgcccaacatggtgaaaccccgtctctacaaaaaaaatacaaaaactagccgggtgtggtagtatgtgcctgtagtcctgggtacttgggaggatgaggcgggaggattgcttgaacctgggaggtcaagactacagtgagctgtaatcacactactgcactccagccttggtgacagagacactgtctcaaaaaacaaacacataaacatacatacatacataaactaaggacttttaatgggacctcggcactgataggccagcccagactcaccagaactggcttcacagagtggattctgaaggagttgggagcaaatcccaagcttacctccctctacccaaaagactgcctggctggtgcttacctgagagatggaggttcctgtgagggcggccccgcaggtgcctccccaggccctacagaggcctcgggccagtagggtggcctggacccagctcatgcctctgcttgtcagacaatcacctggcccaaaagaagattcagcattagcctggcaccttacagatgctaacagacgcaagggccccgcagggtcgagggcacactccagattatgtggctcactcaccagccccaatgtttaccttacccaagaaacaggctgatgactcaaagactttgttcttgggacagcaccctaatcctgctgccccaggggcgtgatcatagctcaatgcagcctccaacttctgggcccaagtgatcctccagccccagagcgtcgagaagctgggactacagacgcgtgccaccatgcccagctaatttgaaaatagtttgcagagacccagggtcttgctgtgttgcccaggctggtctcgaactgttggcttcaagtgatcctcccatctctgtctccaaaagtgctgggatcatgggtgtgagccagcactcctagccactacaatctaattttacaaaatctgtgtcactccaacaagaatccctgtacctggccaggcgcggtggctcacgcctgtaatcacaacattctgggaggctgaggcgggcggatcactcgaagttgggagttcgagaccagcctgaccaacatggagaaaccccatcgctactaaaaatacaaaaaattagccgagcatggtggcgcacgcctgtaattccagctactgggaaggctgacgtaggagaattgcttgaacccaggaggcagaggttgcagtgagccaagatgatgccattacacctcagcctggggaacaacagcaaaactccatctccagaaaaaaaaaaaaagaagaaaaaaaaaaaagaaagaaaccctgtacccattagcactcaatttcccttcactcccaaccccaagaaaccactcatccactgtctctatagatctccctatgccggccatttcatacaaatggaatctggaatcacaagtgctcctttatgattggtttccttcacttgacatgttttttttcttttttctttttttctgagatgcagtctcgctctgtcacccaggctgaagtgcaatagtgccatctcggctcactgcaaccttcgcctcccggattcaagcgattcccatgcctcagcatcccgagtagctgggattacaggtacatgccaccacgcccggctaatttttgtatttttagtagagatggggttttatcacgttggccaggctggtctcgaactcctgacctcaagtgatccgccagcctcagcctccccaagtgctgggattacaggcgtgagccaccgcacctggcccactgacgtgttttcaaggttcatgcatagatttttttttaatttttattatttttatttttagacaggatcttgctttgtttcccaggctggagtgcagtggcacaatctcagctcactgcaacctctgctttccgggctcacgattctcctgcctcagcctcctgagtagctgggactataggtgtgtgccactgcatccagctaatttatagatttttttgtagagatggggtttcgccatgttgccaagctggtctcaaactccttaccttgtgatccgtccgcctcagcctcccgaagtgctgggattatagtcgtgagccaccgcacccgggcttttttttttttgagatggagtttcattcttgttgcccaggctggattgcaatggcatgatcttggctcactgcaacctctgcctcccgggttcaagtgattctcctgcctcagcctcccaagtagctgggattacaggcacccgccaccatacccagctaatttttgtatttttagtagagatagggtttcaccatgttggccaggctggtcttgaactcctgacatcaagtgatccacccaccttggcctcccaaattgctaggattacaatcatgcccggccaattccactgtttttggaatggaatataaccaggttttgtatggctataaccatattttatttatgcattcatcaattgatggacatttggggttgtttgccaaatgtttttgactgttataactactactgccatgaacattcgtgtagaagttttatgtgaacacatgtttatacttctcttgggtatatacttaggagtcaaactgctgagacatatggtaactacatgtttaacatttttaggaactgccagactgtttttggggatgactgcaccatttcacattcccatcggcaacgtacagttgacccttcatcaacaaaggcttgaacagcataagtccatttatacgtggattttttttttttttttcagtaaaagttatggctgtacgtggtggctaacgcctgtaatcacagcacttcgggaggtcgaagcaggcagatcacctgaggccaggagttcgagagcagcctggccaacatgggagagaccctatctctactaaaaaaacaaaaaaacaaaaattagccaggctgggggcacactcctgcagtccccagctactcaggaggcggaggcaggagaatcacttgaacccaggaggcagaagctgcagtgagccaagatcgtgccactgcactccagcctgggcgaaagaggaagactctgtctgaaaaataagaataagaccaggtgtggtggctcacgcctgtaatcccagcactttgggaggccaggcaggataatcacttgaggtcaagagttcaagaccaaccaaccaacgtggcaaaaccccatctctactaaaaatacaaaaattagccaggctccttttgccggtggcggcaagcatggagaggatgccatgaaggcctcgggcacactacaagagtacaaggtggtgggttgctgcctgctcactcccaaatgccacacaccacccctctaccacatgcgaatctttgcacctgatcatgtcgttgccaagtcccacttctggtactttgtatctcagctaaagaagatgaagaagtcttcggggagactgtcaactgtgggcaggcattcgagaagtaccgcctgcgggtgaagaacttcggcatctggctgcgctacaaactcccagagcagcacccacaacatgtaccaggaatattgggacctgaccaccacgggcgctgtcacccagtgctaccgagacatgggcgcccggtaccccacctggacccattccatccagatcatgaagatggaggagatagcagccagcaagtcccaccggctggccgtcaagcagttccaagactccaagatcaagttcccgctgccccaccaggtcctgcgccatcagcacaagccacgcttcaccaccaaaaggcccaacaccttcttctaggggtagggccctcacccaggtgtgccccacgtaaactcaggaacgccccggtaaaaaaaaaaaaaattagccagtcatggtggtacatgcctgtaatcccagctactcaggaggctgaggtgggagaattgcttgcacctgggaggcaatgttacagtaagctgagatcgcgccactgcactccagcctgggtgaccgagtgagactctgtctcaaaaaaattaattaattaaatttaattaaataaaagttacaactttaaacactgaggggctagtaaaaagaaaaaaggtcgggcacggtggctcacgcctgtaatcccagcactttgggagggtgaggcgggtggatcacgaggtcaggagatcgagaccatcctggttaacacggtgaaaccccatctctactaaaaatacaaaaaaaatagccaggcgtggtggcaggcacctgtagtcccagctactcaggaggctgaggcaggagaatggtgtgaacccgggaggcggagcttgcagtgagctgagatcccaccactgcactccagcctgggtgacagagtgaaagaaaaaaaagttacagctgaatgtgcctgcctctccatctacctcctccaccacctcttctgcctctgccacccctaagacagcaggaccaacccctcctcttcctcctcctcctcagcttactcaatgtgaagacgatgagaatgaagacctttatgatgatccacttccacctaatgaatagtaaattcaatgtgttttcctgattttcttaataacattttcttttcttcagcttattgtaagattatagtattatatatatatataacattaaaaaatatgttaatcaccctttccctgccactgccgagttgcgcggaggcggaggcttgggtatgttcaagattcagcttcacccataacccactgccatggccgagggaggcattgctgctggaggtgtaatggatgttaatactgctttacaagaggtgctgaagaccgccctcatccacgatggcctagcacgtggaatctgtgaagctgccaaagccttagacaagcgccaagcccatctttgtgtgcttgatccaactgtgataagcctatgtatgtcaagctggtggagtccctttgtgctgagcaccaaatcaacttaattaaggttgatgacaacaagaaactaggggaatgggtagcgctctgtaaaattgagagaagggaaaccctgtaaagtggttggttgcagttgtgtagtagttaaggactatggcaaggagtctcaggccaaggatgtcatccaagagtacttcaaatgcaagaaatgaagacataaatctttggctcacataaaaaaataagttaattgactgttatgtaatcactgagacctctggacaacagtgggctattagtagttaagattttttgttttgagacaggatctcactctgttgcccaggctggagtacagtggtatgatcatggctcactgcagacttgacctcccaactcaagcaatcctcccaccactgcctcctgagtagctgggattacaggtgtgcgccaccacactcaactaatttttacaatttttatagaggctgggtttccctctattttccaggctgatctcaaactcctgggctcaagcaatcctcccacctcggcctcccaaagtgctggaattacagaggtgagccactgcacctggctggattttgggggtgtcaaaagtagcctggcagggtggctcacgcctgtaatcccagcactttgggaggccgaggtgggcagatcacgaggtcaagagatcgagactatcctggccaacattgtgaaaccccatctctactaaaagtataaaaattagctgggcgtggtggcaggcgcctgtagtcccagttactcgggaggctgaggcaggagaatcgcttgaacccaggaggtggagtttacagtcagccgagattgcgccacactgcactccagtctggatgacacagcaaggctccgtctcaaaaataaataaataaatagagcaccccactgaaggctgggcacagcggctcatgcttcttatccactttgggaagtcagagtgggaggatcacttgagcccgggagatcaagaacagcaaaaagaaaaaaaaaaaagaaagaaaaaaaataccagctgggtgtggtggcactcatttgtagtcccagctactcaggaggctgaggtgggacgatcacttgagcccagcagttcaaggttatatgagctatgattgtgctaccacactctggcttgggtgacagagtgagaccctatctcaaaaataaaaaaataaaaaataaaaagcactctggccaggcgcagtggctcatgcctgtaatcccagcaatttgggaagccaaggcgggtggatcacaaggtcaggagttcaagaccagcttggccaagatggtgaaaccccgtctctactaaaaatacaaaaattagcgggacagggtggcgggcgcctataatcccagctactagggaggctgaggcaggagaatcacttggacctgggagacagaggttgcagtgagccgagattgcaccactgcactccagcctgggcaacagagtgcaacttcatctcaaaaaaaataaataaataaaaataaacataaaaagcactgcaatgactttcatatgcacctaggattaagaccttaatttaaattttcagggccaggctcggtggctcatgcctgtaatcctagcactttgggaggccatggtgggaggactggttgagcccaggagtccaataccagccctgacaacatagccagacactgtctctataaaaaaatttaaaaattaaccaggcatggtagtatacacctgtctgtgttctcattccttgggaggctgaggtgggaggatcacatgagcctgggaggtccaagctacagtaaaccaagttcatgccacacactccagcctgagcaacacagcaagaccctgactcaaaacaaaaaaacaaaaacaaaaacaaaaaaactacagctacttaaagtgtgttctagggactggcagtgtcagcaacatttggaagtttattagaatagcaaaatttggccgggcatggtgactcacgtgtgtaatcccagcacgttgggaggtccaggccagctgatcacctgaggtcgggagttcgagaccagcctgaccaacatggagaaaccctgtctctactaacaaaaaaaaaaaaaaaaaaatacaaaattagccgggtgtggtgtatgcttgtaattccagctacttgggaggctgaggcaggagaattgcttgaacctgggaggcagagcttgtagtgagccaagagcacaccattgcactccagcctgggcaacaagagcgaaactccatctcaaaaaaaaagcaaaatctcggccctatcccagacctactgaactggaatctgcatttttttttttcccaggcggagtcttgctctgtcgcccaggctggagtgcagtggtgcaatcttggctcactgcaacctccgtatcctgggttcaagcaattatcctgcctcagcctcccgagtagctgggattacaggcacatgccaccatgcctggctaatttttgcgttcttagtacagacagggtttcaccatcttgtccagactggtcttgaactcctgaccttgtgatccacctgccttggcctcccaaagtgctgggattacaggcatgagccactgcgccaggcccaaatctgcattttagcgagtccctggtatctcctgtgagcattaaagtttgagaagtggtgatctgtgtgctgatggctccccaatgttcacctcaatccctgggccccagcctttatacctaactgccactttggcatatacccagccatctcaaacataatttgctccaaactgatatccttgcttaaacttgatcctctccatcctatccaatcgcaccactactactggccattcaggctacaaacctaggagacatttctgagtccactatgtccctcactctcctattcaatccatcaactagtctaggtgactacttccaaatccatcccaaatgcatctctttctatctgaagccaccacctcaatctatgacttggatacctatcaagcctcccacttttgcccttcctgcctccagtcagttctccccactatggccagagggagctttttttttttttttttggagacagagtctcactctgttccccaggctggagtgcaatggcgcatctcggctcactgcaacctccgcctccccagttcaagttggttctcatgcctcagcctcccgagtagctgggactacaggtgtgtgccaccacacccagctaattttttgtattttagtagagatggggtttcatcatgttgctcagggtggtctcgaactcctgagttcaagcaatccacccatcttggcctcccaaagtgctaggattacaggtgtgagccaccacacccagccagagggagcttttaaactaaaattaggccaggcgctgtggctcacgcctgtaatcccagcactttgggaggctgaagcaggtggatcacaaggtcagttcaagaccagcctggccgagatggtgaaagcccgtctgtactaaaaatacaaaaattagccaggtgtggtggcaggcacctgtaatcccagctattcgggagcctgaggcaggagaatcacttgaacctgggaggtggaggttgcaatgagccaagattgtgccactgcaccccagtctgggcgacagagcgagattccatcgctaaataaataaataaatcaactaaaattagtgatttctgcctaaaatcgctaacggcatatcacacttaaaatcagagactgggcacactggctcatgcctgtaatcccaacactttgggagaccaaggtaggaggatcacttgagcccagggattcaagaccagcctgggcaacatagagagaccccatctctacaaaaaaattaagaattatccaggcatggtggtgaatgcctgtcatctcaggtactcaggagactgaggctggaggatcctttaaggtcagtagttagaggttgcagtgaaccatgactgcacttgtgaatagccactgcactctagcctgggcaacatactgagatcctgtctctaaaaataaataaatagccagggagcagtggctcatgcctataatcctagtgctttggaagtccaagtggggaggatcgcttgagcccaggagttcaagaccagcctggacaacatagcaggacacgatctttacaaaaattattttaaaaaattagctggacctggtggtgtgcacctgtagttccagctactgggaaagctgaggcaggagaatcacttgagccatggagtttgaggctgcagtgagctatggagtgcactgcaccactgcactccaggcttgacgaacaagtgagatcctgtctctaaaaaataaaaataaataaataaaatcagatagggtctacccctctaaactcaactcctaccactggcagcttcagctacactgtttctgaaagaaactaagtttatcccatctcagaacctttgtacttgcttttctctctgtctagagctttcttcctccagatctgcccacagctgtctctggtcatttcaatgaaaggtcttctttgaccatctcccattccccacattctaaaagccctcatcaccctattaatttttgtttcggagacagggtcctgctctgttgcccaggctggggtgcagtggcacaatcacggctcactacagcctcaacctcctgggctcaagcaatcctcccacctcagcttcccgagtagctaggactacaggcgtgcaccactacgcccagataattttttgtagagaacagggtcttgctatgttgccaaggctggtctcgaaactcctgggctcaagcgaaattcccgacaccattaacgcatttttagtaacttatcagtatctgaaatcacctgtttcgtttatttctaatttgttcaaagtctggttcccccaggagatgagagatttttatctatcttcctcattgctgtgtctccagcaccaaggacagtgcctggtatatgacagatgcctaacgagtaacaactgaacggaaacaagcctcaatttcaaaaaaacacctataaatctgaaccccgaggtatggtgtacgtacaacagctttgaaaccggctgccaggattctgggtctcttgggggaaaaaggcagacgcggattccaaatcctgcccggttgccgacttgcggcgtgacctctcgcgaggtcatctgcaaaatgggagactgggggcgtgaggcggctggcacaagacaggcggcctttcccagcgcgtccccgcccccactacgaaaggtcatggcgccctggccctgcagctgggtccctccagggctgccctctcgcgctgccgggtcctgaagggcccgcctgcagcccagcagttcgcgttcgcctacccgcgcgcgacctacctactcacgcggccagccgcggactccaggccagctctgtcttgttgctgggcgctgccatattggcccagagagcgtccgggtcagggagctccagggaggtagcaaatcaagaaagctggtgtaataggtcccgcccacaacgcgaggtgggccaataggaaggcggaaggatctgggacccgcctcataacgagccaggcccagcctctaatgaggcaagacgcactccagacctgggaaccttgaaatggcccgggaggctggacttgggagtcatagtctatgaatccagtcgcaggccccagcggctgaaatgagaaaatgaattaaaaaaaaacaaaaagtgaaagggggccggtacggtggctcatgcctgtaatcccagcactttgggaggccagaagttcgagaccagcctgggcaacatagcgagacccccttatctacaaaaaatttaaaaattaactgggcatgatggcgcatgctcatagtcccagctattcgggaggctgaaacgggaggatcgcttgagccctggaggtcgaggctacagcgagccatgattgcacccctgcactccagcctgggcaacagagtgagaccctgtttctaaaaatagtaataataaataaatagggcagggcgcggtggctcacgcctgtaatcccaacactttgggaggccgaggcctgcggatcacctgaggtcaggagttcgagaccagcctggccaacatgatgaaaccccgtctctactaaaaatacaaagttagcagggcatggtggtgggtgcctgtaatcccagcttctcgggaggttgaggcaggagaatcgcttgaacccgggagacggaggttgcagtgagccaggataacaccactgcactccagcctcagcaacagagcgagactctgtctcaaaaaataaataaataaataaaaattagtggggcgtggtggcgtgctcctgtgatcccagctactcgggaggctgaggcacgagaattgcttgaacccaggaggtggaggttgcagcgagccgatatagcaccactgcactccagcctgggcgacagagtgagactccgtctcagtaaataaataaataggaaggcctcagtgaggtgtcctttgagtaaaggccggaggaagtgagtgagccatctggatatctggggaacgcttttggcactgggaacaacagcaaagactctgtgtggtcggagtggagtctttggaggaaatgggataaaacgaggtgagattgagtaatgggggctcctggtctcccccagaaagcaccagatttaggctgttaataactaaggtggataagcacataaaatgggctattggcaataacagtgtcccccgggaaggaaggctatctgccctcataagcccatttctgcagtccctcagcctctgtggcgcagtgagctggcatggagactaggatgcaagaacctacccttaggatgcctcaaggactctgcgcagccgcaggacatccacctcatcagaactcttgtgattgggcaatctgagaaaacctgtagccaatcagctgcttggctggagcactcctctctggcaagttgacaggcacgtgggcagcggctgggagcgctactgccctctgccaggctcccgcagctacaagcaagcagagtcagctctgcttagctggggagtgggtaagatgatggggtcgctgacctggctgtggccttcagagttattggtgtccttctcttgaggtggtcatggcttttgttttcttatttatccttccagaactagtcttttaatattttattttattttattttattttatttttggagacggagtctggctctgtcgcccaggttgcagtgcagtggtgcaatctcagctaattgcaacctccgcttcccacattcaagcaattctcctgcctcagcctcccgagtagctgggactacaggcgcatgccaccatacccggctaatttttgtatttttagtagagatggagtttcaccatgttgcctaggctggtctccaactcctgggctcaagcagtcctcccgcttcagcctcccaaagtgtcagaattacaggcattagccaccgtgcccagtcattattattatttatttatttatttattttttgagacagagtcttgctctgtcgcccaggctggagtgcagtggcacgatctcggctcactgcaaactccgcctcctgggctcacgccattctcctgcctcagcctccccagttgctgggactgcaggcgcccgccaccatgcccagctaatttttttgtatttttagtagagacggggtttcactgtgttctccaggatggtctgatctcctgaccccgtgatctgccagcctcggcctcccaaaatgctgggattacaggcatgagccaccatgcccggcctattattattattttaaaatagagatgggatcttaatatgttaccaaggcttgtctcaaactcctggggtactgcgatccacccatcttggcctcctaaagtgctgggattataggcatgtgccaccacaccaggccagtagtcttttaaaaacaagtaggtacaggccgtgcgcggtggctcacgcctgtaatcccaccactttgggaagccgaggcgggtggatcacgaggtcaggagatcaagaccatccagcctaacaaggtgaaatccagtctctactaaaaaaaatacaaaaaattagccaggcgtggtggtgggcgcctgtagtcccagctactcgggaggctgaggcaggagaatggtgtgaacccgggaggcggagcttgcagtgagccgagactgcaccactgcactccagcctgggcgacagagcaagactccatctcaaaaaaacaaacagacaaacaacaacaaaaaaaccaagaatgtacatattttatgtactgtatgtattaacacagaacaccatatgtgaggccctggtgcagaatctttaacattacagtcccagaaagaaccctataaaaagtagtagcttcacagtgaaagatcctagcagacaccaccttaaccaagggaccaacatttatatcaccagcaatgagtcatggtgatatcatgaagcccttggtatgacacacttagaaggatacatcatcacctctctggtattcttcctggtaatgcaaacacctcagtttattcaagacaaaccaaactcgaagacagtctacaaaataactgaccagcactcttcaaaagtgtcaaggtcctgaaagacccagggactattatagactgtaggaatgtatggagatatgacaattaaatgcaatgagggccaggcacagtggcactgtagttctagctatttaggaggctgaggcaggaggatcacttgaacccaggagttcaagtccagcctgggcatcatagtgagacctcatctctaagatagatagatagatagatagatagatagatagatagacagacagacagacagacagacagacagacagaaagaaagaaacgcaatgggccggatgcggtggctcacacctgtaatcccagcactttgggaggccgaggcagacagatcacaaggtcaggagttcaagaccagcctgaccaacatggtgaaaccccctgcctcagcctcccatgtagctgggattataggctcccaccattacgcccagctaatttttgtagtttttgtagagatggggttttaccatgttggccagggtggtcttgaactcctgacctcaggtgattcacccgcctcagcctcccaaagtgttgggattacaggcgtgagtcactgcacccagctggagtccccactcttaaccacagcgctacagtgtcttcatttagttgaaacaacatgctatatgttttaacttcaactttgtctatctcccttgtcccaggttgatgggatttatagtgatttattatgacaaggccactgcaataaatgttcctgtacatatgtcattcttcacacctacacttgtacttctgaggaatattctaaaatagaggatatacttgttcagaaggtaaggacatttgtcatttgggaaactatcaacaaattgcccacactcatcaacaatgttcccacagcctcctctgcgttacatgttgtcaagcattcttttatttatttatttatttatttatttatttatttatttttttgagacagagtctcgctctgtcgcccaggctggaatgcagtggcacgatctcagctcactgcaagctctgccccacagcttgacgccattctcctgcctcagcctcccaagtagctgggactacaggcgcccgccaccacgcccggctaattttttgtatttttagtagagacagggtttcaccatgttggccaggatggtctcgatctcctgacctcgtgatccgcctgccttggcctcccaaagtgctgggattacaggcgtgagccaccacacccggccgtcaagcattcttttcttttcttatttatttatttttcacccaaactaaaatgcaatggcatggctggacacagtggctcatgcctgtaatcccagcactttgggaggccaaggcaagcagattacctgaggtcagtagttcgagaccagtctggccaacatggtgaaaccccatctctactaaaaatacaaaaattagcccggtatggtggtgggcacctgtaatcccagctactcaggaggctgaggcaggataattgcttgaacctgggaggtggaagttgcagtgagctgagatcatgccactgtactccggcctgggtgacagagtgagattctgtaaaaaaaaaaaaaaaaaaaaaaataagcagtgtcatgatcatagctcactgtagcctccaactcctgggctcaagcaatcctcctgccttgccctcccaaaatgcacttttttaaaaagctctctctcttttttttttttttgtagaggcagggccctgccatgtctcccaggctggtcttgaactgctggcctcaaacaatctgcccatcttggcctcccaaagtgctggaattacagacacgagccactgcacccagactataagtgaacagctccctccctgtccacccactcacagtcagtctgggggtgagagatgctattattttacagcaggtggtcagggaaggcctctctgagaggtgatattagagcagagactgaatgaagttggggagaggccatgcaggcatcttgcagaaatgtgttccaggtggcaggaactgctattgtaaagaccctgaggtgggaacatgtttggggactcaagaaacacatctgtagcccagcgtggtagcgggtgcctgtaatcccagctacttgggaggctgaggctccagaattgcttgaaaccaggaggtggaggttgcagtgaaccgagatcatgccactccaacctgagcgacagagcgatactctgactcaaaaaaaaaaaaaaaaggagaagaagaagaagaaataaggagaagggagaagagagaagggagaaggggaagaaggagaaggaggaggagaaggaagaaagaagaaagaagaagaaggaggaggaggagaagcagcagcagaagaagaggaagaagaaggagaacaagaagaaaaagaggaagaggaagaagaagaggaagaagaaggagaaggagaaggagcagcagcagcagcggaagaggaagaggaagaaaagaaagaagaaagaagaaagaaggagaaggagaaggagaagaaagaagaaagaagaaagaagaagaagaagaagagggagaagaagaagaagaaacagcacatctggagggacttggaagaaaaggtacaaacagtgttacctgggagggtggcttggcttctctgaaccttgagtttcccatctataaaatggacctatgagtttctaccctcagaaggtgatggtgaggattaaaagagattgtggctggcatggagtgagtgttcccataacagaagcctttaggaacaagagcctctgccagatttctggataggaaagcttcgtgaggagggagcttgcagagcaggatgccaagataggccggtgcagagcagggctttgactttccccaaaacacacagacaaacacgtgtgagtgtgggttttatttttatttttacattttttgagtcagagtctcactcccgtggcccaggctggagtgcagtggtgtgatcttggctcactgcaacctctgcctgacatgccgggttcaagcaattctcctgcctcagcctcccgagtagctgggattacaggcatgtaccaccatgcccggctaattttgtatttttagtagacacggggtttcaccatgttggtcaggctggtcttgaactactgacctcaggtgatccacccgccttggcctctcaaagtgctgggattacaggcgtgagaaaccacgcccggccaagtgtgagttttaaatggttctgagcatcaggaaggttttagggggtcccctgaagttgaggagaggcatggctttcctacaatgactgtcctagacccttcgggaaaccgtgcctcttacaagatcctacacttctcatttagatggtaaactgaggcacagaggggctagagcctggaaaatgccagaaaggagcgaataagggatgacactcgggtgtctactgggattggggcctcgatatgggatcagccccctctaatgcctctacccccatctaccagacagagacgcgaagagagacggacaatacagcgacagcgacatgaagagaaacagaatgactcaaagaccaggcacagaaacagagacacagagacaaaggcagagacagaaaaaggctcagcgacccagagacggagatacagagacacagacctactacaatcagagggacaaggcagtccccgaaagggctgccccctgggggtacccggggctgccccgttggggggcacgccaagagctcccccaccccgcccccgtcgtgcctgggccgtgacttcagagtccgtgcagattctataaatggccaagaggccgcgggccggggggcggggccgagtgagtcatcgcgtgacgtcaccgccgcctggacctcgccaggtcccgcccccgcccctcccgggccgccagggggcgccggctgcaggtcctcacatgcgcagtagcgaactgcggcccccgagggccgctcagtttgggagggatccaggaatctgcgcgttcgaatcccgcccctgccaccctcgagctgtgtgacccggccattcggcgtcacctctctgtgcctcgtatagacccacctcataaggctgtcgtgaggaatgagttaacaggctcaaagctcttagtacgtagcaggtgctaattgttagctcattttatgtactttctattttttcttttttttttttttaaatagagacggggtctcgctatgttgcctaagctggtctcgggtctcgaactccagggctcaagcgatcctcccgccttggcctcgtattttatgtattttcgtgtatgttcaacatatcatgacatgccatcaactagcacattgccttagctcagtggttggcaaacaggggtgatctgcttccaccccgaccccaatcatgggacattggcaatgtgtgtagacatttcttcttttaatttttcttttttagagaccatggtcttgctatcttggccagatggttctcaaactcctgggctcaagggatcctcccacctcagcctccttagtagctgggactacagggtcctgccgcagtgcctcaacatttctgtttattaggactaagagagtgctactggcatgtagcaggtagaggccaggcatgctgcttgaagtcttacaatgaatgcccaaggcagccccccaaccatgaagaattatccagcctcagctgtcaacagtgtggaggttgagaaaccccaccttagcctcatagttgaggttcatggagcatggtctcaaattctcctctgcccctggcctgctgtgtgacgctgaaaaagtgattccaagcccccgtgcctcagtttccccacctgtaaagcaaagtacttgtattaataataacagtgtcagctgggcacggtggctcacgcctgtaatcccagcactttgcaaggccgaggtgggcagatcaactgaggtcaggagttcgagaccagcctggctaacatggcaaaaccccgtctctactaaaaatacaaaaaatagccagtcgtggtggcagacacctgtcatcccagctacttgggaggctgaggcaggagaatcgcttgaacccaggaggtggaggttgcagtgagccgagatagcatcactgcactccagcctggggaatagagactctgtctccaaataataataataataataataataataataataacagtgtccatctctgagggcgtcatgagaattgaatggatatatgtacagagttggaacatggcctgacataagggctgtagtctgtggcatattgcagccatgccattagcatgtgaccgataaactgcatatcctcaacatatcattagtgtgtggcaggttgcagacatgtcatccaagtgtcacaaacatggccttgccatgtggggcatgatgtgggcatagcatccacccctgtggtccaggggtgagatctggctgggtagggctgtttgacagggacacagttcacggcctgggacttgccaacaaagtcaccctgtagttcaggtgacacacaagtggatggggagggtgagacccaggatctcttctcccccaggtccttatgaggggctggaggagacagaactggggtgctggaccctcagcataaagaatgctataggctgggcatggtgactcatgcctgtaaatcccagcgttttgggaggccaaggcgggcagattgcttgagcccagaaatttgagaccagcctgggcaacatagcgagaccccgggcaacatagcgagaccccatctctaaaaaaataaaataaaattagccaggttggtggcacaagtctgcaattctaactacttggatgggctgagatgggaggatcacttgagcctgggaggtcaaggctgcagtgagctgtgattgtgccactgcactccagccgaggggacagagtgaaaccttgccttaaaaagactgctatggcccgagtccctctgctgtgccgggcactgtgctgggcatgtaacaggcatattcttctgatctttacaactctcccatgaggcaggcactatcgttagcccattttacagatgtggccatagaggcccagagaggagaaggggcttacctaaggctatagactgttggtatctggagataaacccgggatggtgctcactaaactaccttgggtgtcagtcctgcttcaagactccagagagataaagagagatgacctcagagacaaagagactcagacccagccagaggcccaatggacagtgggaggggtgggtggaagaaggctggtctctgtctgaccaagcccccccagaataacgcaggctgcccccctaggtggaaacaatgacacaatcagctcccaataccaagggcctgacatcacaaggggaggggaaggcagctgaggttgtggggggaggtgccccgccccttggcaggcccctacagccaatggaacggccctggaagagacccgggtcgcctccggagcttcaaaaacatgtgaggagggaagagtgtgcagacggaacttcagccgctgcctctgttctcagcgtcagtgccgccactgcccccgccagagcccaccggccagcatgtcctctgctcacttcaaccgaggccctgcctacgggctgtcagccgaggttaagaacaaggtagggctggagggcctccctggcctggcccacacgtcctgccaggccagagccctgagcttggggtcccttgaaccccctcctgcctatcctatgtgacttggaaactgagaggggaaaagggagtgatatgggataggggctgcctgtctccccctgaacatcccggagcccccagctatggttggggctggaatgggggggcacacagccacacataaacagagggggtcagtccattgcaaagatacccacctgatcagtcttctgttaacccttcgtgttcttggggggaacaacatagggggaagacttgttgatttttccatatcccccggcctgacaaagaaattggggagcgcttgagtgctggggtacctgggaagtgacgccgtgaaagtgtgggagatcctgaagacagagggggacggtgaaaggcaggaagcgggcatcagaagtgcggcaggggtctcctgactgtggagctaggaagatacctggacaccaccttcatgctatggttgggtaaactgaggttcggagaggagaggcaaatagctggggtcccaggtaaagcaggtacagcgctcggaccctggactcaccccccatacaccaggatgggctcagcttctcccagctggagaactttaagtttccagcccactggaatcgccccaacagtattgccgagggaggagttcctgccccatttgacagaggggaacactgaggctcagggtggcttttcccagggtcccatggtgaggaagtgggggactgggttggaacctgggtcgagggatctcggggctggaggagggggctggtggggggcgggtcctcgggcgagagacagatcccagcgccgccctcctcccccccagcgccggccccagagccgcgcagagccgcgcagagacgccgcgccttataaggcggcctcggggagcccgggccacgctatataagggccggtttgctttataaagccgggctggtggcgtggggggcggcagggccagggccaggtgagggggccgcccctcccacctccccccactcacccgggagaagaagaggcagcccggtcccctaggggctgggagcctggctgggcttgggcggagggttctggagaaatgggagtggagtgggggaggggggggacagtggagagagggaaaagcagggaggtggggggagaggcagacagagatactgggagcctgagacaccctagggacagacgggggagggcgagccaggagcgagataagacctagacaaggatggaggggcagggagaggagacagagccccaccacccccaccccaggcaggaaacctggagacagagaaagacctagagaggcagatatacaagacccaggagccctacccctggccagacagggactagccacctagagagatggggacccaagactgggccaagaaaagacagcgctggggaagagagagacagaggagtcggggggataagagggagagagacatacagacgtgcaaggggtgggggctaagacagagacaagcccccaccactaaccagagacagagccctggagctgaagacctgggggacacggagagacagagatgtatgaccagcactcctctgcaagccagcacccagggacacctccttagacatccttcttcccttcctgaggtgccctctcttccaacagggggcacagagggggcagggctagaggaagagaagccccaagtttggcctgggcgaaaaaccagggtgccgggtgccacccctctagctcagaggatccagctccccacaccccacccctcatctacattccctggtgccaaacctcagaatgcccggaatggccccctgggcaggtgccacctcagccctggctctcagcccgccccagcccccatcccccaactatggatctggggcaaaattgccttagttgggaaggacgagggagatcaggctctaggaagttcagacaggacccagggagcccaggctgcccccaatgcatcctcacccctttctctgtgccccctgccctcccctcgccccagctggcccagaagtatgaccaccagcgggagcaggagctgagagagtggatcgagggggtgacaggccgtcgcatcggcaacaacttcatggacggcctcaaagatggcatcattctttgcgagtgagtgaggctctcgaagccgagaccctgcaacatcccccaactccatgcagcccctcaacccccaaaacaaccatgatcctggaactgagttgaacactttctattggatacctttggggtggccagtaatcattgtgcccatttaacaggcacagaaaactgaggctcaggtgaaatgcattgcaccaagtcccacgtggtttcaagggaaatgactctagaatcttaaccaccatgctatatagggtaggcccatctgtggccgccagagtccccagaaagagcggtcacagctaaaaggcagcagccaacagctgttcatggctggcttggtgatgtgaggagagatgtgcagcaataattaaaggaggccctggttttctttctgttttctttttgtttttttgagatacagtcttgttctgttgcccaggctgcagtgcagagacacaatctcggctcactgcaacctccgcctccagggtttaagtgattctcctgcctcagcctccccaatagctgggattacaggcacgcaccaccatgcctggctaatttttgtatttttttaaagtagagatggggtttcaccatgttggccaggatggttacgaactcctgacctcaattgatccacctacctcagcctcccaaagtgctgggattacaggcacgtgccaccatgcccggttaatttttgttttttttttttttttttcagtagagatggagtttcaccatgttgactaggctggtcttgaactcctgacttcaagtgatccacctgccttggcctcccaaagtgctgggattgcaggcacatgccaccacgcctggctaatttttgtattttttttttttttttttagtagagacagtgtttcaccatgttgaccgggctggtctcaaactcctgacctcaagtgatccacctgcctcggcctcccaaattgctgggattacaggcatgagccacctcgcccgaccttcttcttcttcttcttttttttgagatggagtcttcctctgtcacccgggctggagtgcagtgacatgatctcagctcactgcaacctctgctttccgggttcaagtgattcttgtgtctcagcctcctgagcagctgggattacaggtgcccaccaccttgcccggataacttttgtatttttagtagagacgggattttgccatgttggcctggctggtctcgaactcctgacctcaagtgatccacccgccttagtctcacaaagtgctggcattacaggcatgaaccactgcaccctgccggccctggttttctcctcgcctcaaaacctcattgctgagggaggtgaaaaccctaacagctcccaagccccagttccactgcaatcttttttttttttttcagatggaatcttgctttgtgacccaggctggagtgcagtggcatgatcttggctcactgcaagctctgcctcccaggttcaagcaattctcctgcctcagcctcctgagtagctgggattacaggtgcccgccaccacgcccagctaatttttgtatttttagtagagacggggtttcaccatgttggtcaggctggtctcgaacccctgaccttgtgatccacccacctcggcctcccaaagtgctgggattataggcgtgagccaccgcgcccggctccactgcaatcttaatgcatagcagggccctaaacccagcctgcgcccgatctgcatttgagtctgacccagggcagagtgactgtgagtggcctcgggaagactttgaaggtgcagcttcatcaagtcctagatgctgggaagaaggggtgtggggggtgtttaccttgttccattcccatccactaggaacaaggaattggcaggtggggaggtaggcatgctggtgtcccagctcaggcagaggactgctcagacgtcaaacagtgcagtcccagcctgggcaacatagccagattccatctctacaaaacatttttgttttaattagcttggcatggtggcatgcgcctgtggtcccagctactcggaaggctgaggtgggaggatcgcttgagccctggaggtcaaggctgcagtgagctatgatcgcgccactgcactccagcctgggcaacagtgaaaccctgtctcaaaaaaaaaaaaactaatgtaaacgacaagttgatgggtgcagcaaaccaacatggcacatgtatacctatgtatcaaacctgcacgttgtgcatgtgtaccctagaacttaaagtataataataataataataataataataaaagagtgggccgggcgcggtgactcacgtctgtaatcccagcactttgggaggctgaggcaggcggatcacgaggtcaggagatcaagaccatcctggctaacacggtgaaaccctgtctctactaaaaaaaatacaaaaaattagccgggcgtggtggcaggcgcttgtagtcccagctactcgggaggctgaggcaggagaatagcgtgaacccgggaggcggagcttgcagtgagccgagatcccaccactgcactccagcttgggtgacagagcgagactccgtctcaaaaaaaaaaaaaaaaaaaaagacctaatgtaaatgacgagttgatgggtgcagcaaaccaaaatggcacatgtatacctatgtatcaaacctgcacatagtgcacatgtaccccagaagttaaagtataagaaaaaaaaaaagagtgtagtgcagtcacccacgcactccggtcattcactcattcattcattcattcattcacaaaagaagcatttatgagttcctgctgtgtgccaggctctggcctaggcactgggaacagtgaacagaacagactcgactcagagctcaaggacttttagtccagttgaggagatcaatcatataattgatcaaataatcacagatttgtggtcgtaagtgtcctggggaaaactcaagcggaagggaagatgggagggtcaggtatatgtctgcgggtggagagtctgcagtttcctagagagtggtctgggaggcctctctgaagaggtgacatttgaacagaaccttagatgaagtgagggagggctcaggggacctgaggcaaagcagagggggccaccagtgcaaaggcgtgaggtaggatcgtgcttggggtgttcaagaaacaagaaggaggctggcgtgacgagcaccaaatgattgagcagaagtggagatgaagtcgcagagtgaactgagagtcagatggtggagggcattttatttcatttatttatttagagacagagtcttgctctggtgcccgggctggagtacagcggtgcaatcatagctcactacagcctcgacttcctaggctcaactgatcctcccaccccagcctcttcagccccagcctcctcagtagctggaactacaggcacacatcaccacgcccggtgaagttttcgggttttttttttttttttttttgtagagacacgggtctcaccatgttgcccaggctgatctgaaactcctaggctcaagccatcctcctgtctcggcttcccaaagcactgggattacaggtgtgagccactgtgcccagttctacagagggcattttaggcagaggacttaggatttcattctgaaggcaatgggaggctcctggaggatttggaactggacggtaacttgaactgtttaaaaaaggccattctgggccaggggcagtggctcatgcctgtaatcccagcactttgggaggctgaggtgggcatatcacttgaggtcaggagttcgaaaccaacctgaccaacatggtgaaaccgcgtctctactaaaaatacacaaaatttagctgggcatggtagcaggcacctgtaatcccaactacttaggaggctgaggcaggagaattgcttgaacccaggagacagaggttgcagtgagccgagatcccgccactgccttccagcctgagtgacagagcaagactccatctcggaaaaaaaaaaaaaaattctggctgctggatgaagaagggtgggtctgtaggggatgaagtggaagttgggagctcattacaagaggccaggaaacagactctggtggctgagacccaggtggaggtggcggggagcagtgggtggttttctggactcattaaaaggcagagccaaagaactttggagggactggacatgaggctgagagaaggagaaagggggagttgggggcaagtccaagggctctggctgagcacctagaagggggcactgctaggcagggaaggtggagggaggggggagtctggagggggaagctgcatgtcaggagtctggagcagggtgagtttgatttgagacacccaggcacccatggagagagctgaatgagatggtaagaaacccaagctgcagggagatgagggagttgctggcatatggaggcacttaaagtcaagacactgaatgaggccaggtgctgtcactcatgcctgtaatcccagcgctttgggaggctgaggcaggaggatcgcttgagcccaggagttcaagaccagcttgggcaatacaaatacagtgaaaccccctctctaccaaaaaaaaaaaaaaaaaaaaagccaggcatggtggtgcgcacctgtgatcccagctactcggaaggctgaggtgggaggatcgctggagcctgggaagttgaggctgcagtgagctgtgattgcaccactgctctccagcctgggcgacaaagccacaccctgcatcaaaaagaaaaaaaaaagaaaagaaaagaaaaaagaggcgagatcattaaaggagtgagtcagagaagaggcccttgtgggcttcctgctgtctacaagagaaaaggatgctgagacacgcctgccagtgaggcttcggagatcccagagactcggacacaccttggataagcaggctttctgactgggacctgagtctagctccttggcatcagtgtcccatttgtgtgtgtgcttgggtggtttggaggggctgcagctgagagctgactgcagggagaagtgacgctagggtatggcatggccccttgtggtcatcccgtcaccctcctcctgctgggctgggctggagagcgggagtgggggacacctttctttcttttttttttttttttgagacggagtctcgctctgtccccaagctggaatgcagtgctgcaatctcagctcactgcaacctccgcctcctgggttcaagtgattgcctcagcctcctgagtagctgggagtacaggcatgtgccaccacgcctggctaatttttgtatttttagtagagatggggtttcaccatgttggccaggatagtctcgctctcctgacctcgtgatccacccgccttggcctcccaaagtgctgggattacaggcgtgagccaccgtgcccaaccctggggggacacctttcttaccccttccccactcttctcagattcatcaataagctgcagccaggctccgtgaagaagatcaatgagtcaacccaaaattggcaccaggtgagcccagacacaatctcttccatccttgcccgcaagcccctcagacctcccctccccacccagtgaccaccacctgcccccctctagctggagaacatcggcaacttcatcaaggccatcaccaagtatggggtgaagccccacgacatttttgaggccaacgacctgtttgagaacaccaaccatacacaggtgcagtccaccctcctggctttggccagcatggtgagtgtggttgcaggctgggcagggggtggtgggcagcctgggctgggatgcaggtgtggccacttgtgctcctgagcccagtgaaggtggcggagcggggggcagggatcggggagcaggtgctgtcaacagcgtccaagggggccgggcgcggtcgctcacacctgtaatcccagcactttgggaggccaaggtgagcggattgcttgaggccgggagtttgagaccagtctggccaacatggtgaaatcccgtctctactaaaaatacaaaaattagctggacgtggtgacgcatgcctgtaatcccagctactcaggaggctgaggcaggagaatcgcttgaacccgggaggcggagtctgcagtgagccgagatcgtgccactgcccagcctgggtgacagagccaagactccgtctcaaaaaaaaaaaaacaaaaaacaaaaaacagtgttggccgggcacggtggctcacgcctgtaatcccagcactttgggaggccgagacaggtggatcacaaggtcaggagattgagaccatcctggctaacatggtgaaaccctgtctctactaaaactacaaaacaaaattagccgggcatggtggcaggcgcttgtagtcccagctactagggagactgatgcaggagaatggtgtgaagccgggaggcggagcttgcagtgagctgagatcacgccactgcactccagcctgggcaacagagcgagactctgtgtcaacaacaacaaaaaaacagtgtccaaggggactgtgcagcctggaggcccccttgtcagtccctgctttccctgccccacctaggcgaagacgaaaggaaacaaggtgaacgtgggagtgaagtacgcagagaagcaggagcggaaattcgagccggggaagctaagagaagggcggaacatcattgggctgcaggtaccgccctgtcctcactgcgcagaggtcatagaggccaggagggcaccctgatgtctgaaggcttttggggacaggatatttggcattaactatactataggccgggtactgtgcttatgctcatcttccattcacaaactcactcactctgccaacaccccagcagacaggtgcttgttatcaacataccctttccgcagatgagaaaactgagacccggagaagctggctcgcttttgcacagatcttccagctgatgcgtggcaggctggaacttcaatgctagaagtcagtcatgtgataggcccactctgggcctcagtttccagtctcgaaaggatgcctcaggcggggtgcagtggctcacacctgtaattccagcacttggggaggctgaggcaggaggattgcttgaggtcaggtgtttcagaccagcctgggcaaaatagaacccccctccaccgccatctctacaacaaatttaagagtttagccaaatgcagtggtgtctgcctgtggtcccagctacttaggaggctgaagtgggagaatcacttgagcccaggagttcaaggttacaatgattgcatcactggactccagcctgggcgacagagtgagaccctgtctctaaaaatgaaaatgggctgggtatggtggctcatgccagtaatcctagcacttcgggaggccgaggcaggcggatcacttaaagtcaagagttcaaggccagcctggccaacgtggtgaaaccctgtcactaccaaaaatacaaaaactagccggtgtggtggggcacacctgtagtcccagctactcaggaggctgaggcaggagaattgcttgaactcaggaggcagaggttgcagtgggccaagattgtgccgctgcactccaacctgggcgacagagtgagatgctatctcaaataaaataaaataaaacaaaaaaatagaatagaacaaaataaaatataaaaataaactaaaaaatgggccaggcacagtggctcacccctgtaatcccagcactttgggagggtgaggtgggtggatcacctgaggtcaggagttcgagaccagcgtggccaacatggtgaaaccccatttctactaaaaatacaaaaaattatccgggcatggtgatgcccacctgtgatcccagctactccggaggctgaggcaggagaattgcttgaatgtgcaagatggagatttcagtgagctgagatcatgtcactgcactccagcctgggcaacagagcaagactccgtctcaaaaaaaaataaataaaataaaataaaaattgaaaaaaatgataaagcggcgcctcatcctctcccatcagctatgcctcatggcccatgatgaggtctgtaattattggtgtgattctccttctggcttcctagatgggcaccaacaagtttgccagccagcagggcatgacggcctatggcacccggcgccacctctacgaccccaagctgggcacagaccagcctctggaccaggcgaccatcagcctgcagatgggcaccaacaaaggagccagccaggtgagtgggggcccccgggacacgccgtcaaggcccaggaccctggccaccccacggcctgaccacaccacccttcgcaggctggcatgactgcgccagggaccaagcggcagatcttcgagccggggctgggcatggagcactgcgacacgctcaatgtcagcctgcagatgggcagcaacaagggcgcctcgcagcggggcatgacggtgtatgggctgccacgccaggtctacgaccccaagtactgtctgactcccgagtacccagagctgggtgagcccgcccacaaccaccacgcacacaactactacaattccgcctagggccacaaggccttccctgttttccccccaagggaggctgctgctgctcttggctggacccagccaggcccagccgaccccctctccctgcatggcatcctccagcccctgtagaactcaacctctacagggttagagtttggagagagcagactggcggggggcccattggggggaaggggaccctccgctctgtagtgctacagggtccaacatagagccgggtgtccccaacagcgcccaaaggacgcactgagcaacgctattccagctgtccccccactccctcacaagtgggtacccccaggaccagaagctcccccagcaaagcccccagagcccaggctcggcctgcccccaccccattcccgcagtgggagcaaactgcatgcccagagacccagcggacacacgcggtttggtttgcagcgactggcatactatgtggatgtgacagtggcgtttgtaatgagagcactttcttttttttctatttcactggagcacaataaatggctgtaaaatctcctgaggcctcagagctgctctgttttagatatgcgccatatcccgcacacacatctgcacggacacacatgcccacatgcaccctaagacgtacatacacactcacacgcaccctaagacacacacctcactgtagccactcagctagacacaggacaggcaccccatcacactcacatgcaaagtccacacacacacacacactcccccctttcacacacagatatgcacacacaggcagtacacactccctacgacatgtaaaaaaggcatagccagccgggcacagtggctcatgccggtaatcccagcactttgggaggctgagatgggaggatcacttgaggtcaggagttcgagaccagactggccaacatggtgaaaccttgtttctactaaaaatacaaaaattagcagggtgtggtggcgcatgcctgtagtcccggctacttgggaggctgaggtaggagaatcacttgagccctggagatctaggctgtagtgagctgagatggcgccactgcattccagcctgggcaacagagcaagactccatctcaaaaaaaaaaaaaaaaaaaaaaggcacagccagagagccaatgcgcgcgcgcgtgcacacacacacacacacacacacacacacacacacacgacccacactgctctcccagaggcttgtggatggtggtgacaaagagcctgagtactgggacaggctaaatggcatgtgaatcacagagcagctgcctggatgacctcgggcaatcactttccctccctagacctgttttcccatcaaaataatggggacagtaagcctcttgtggtcatgaaatgacacccccagatggggtgatgttctacatgtttaatcgctggtaaagaccaggcatcaatagagaaaggatgacaagtaggggtcctggtgggccctgtgggcagggtgaaccctttagccccagactgtggggaggggaaaggggacagggagaggggcacttctgagccaaggcaatggccctttactgactggcacagggcaccatagggcacggttaattctgtgcgccccgcccgctctcagccgtcttaaggctgagcctgccaacccgggactctaaaaggctgtgtccagggcctcaacctcctcacatttcagaggggaccctgttatccccgggaggagggagaggtccccaaccatcaggattccaaggaggagaggaggcagagaagcgaggagcgcggcacggagctgtcttctccccagggagggcaggagttgaggctggaacgtggagacctgcggaggcagacaccagaagacccgcgcacagacgcacgcagcccctggggcctcgtaaaccggattccaggcgcttttggcctggctaccgcaagtcctgctccccctgggccggcgcggggaagctatgctgaggaggatccgggcctggcccagggccctgcctcctcgggaaaacagcaccatattagcacttagcctgtgaggctggggtgggcgggcggcaggaagggcctcgggtgccagaggaatgagccccctttttgctggatcccagagggccatcaccctaaacctaggtgcctgtccaccactctgcgcatgtgtgccggctcctgccagggctagcagaccttacctgggatcttggaggtggcgggataaccagggaagacatgtcatggcagagtgggcctgagggggtgcacaggccagacccagcagcccagtctggcagccagggcttccgggccagctcaatgtctccccccgctgttcacatccgtcagtgccctgggtgggccccagagccgctcaaaccatgcctggcacttccatcctcagcatggctccgggaagaaggtgctttcatcccctgcactgtagcaacgaggactctgaagcacaggtcacctgccacccgggctcatgaggccaggtggagggtctggcactgccccaggttgctgggtgttgtggtccttgtcaccggtgcgaccagctaaggggacatcagccctcaggtgctccccatcggccacacacatcccgccccaacaccagccttctgagagtcctcaccacccttgaataaaggcccctttcatgtttccctcccgtgtccctcttccactcactacctccagaacggcctgtaagctgttccctcagcctggactctgggctcacaagaagtcagactgtaagctgtggagcctcgtttcctgggttcaaatcccccctgtgccactttctggctgtagggtcttgggccagtgacctccttcacctctagcctctgtttcctcatctttgaacttggggttagcttggcacctgccccacaaagtggctgtcaggacactggggcgacgcaggaaggccagaggtcagcgtctggctagaggtggccctacggtgtcactgtctcagcctgcccctcccagaagcctcctctgaccacctgttctgtctcacctcccccatttcctattgtgactgctgtaaacacctggccagatgtctgcctgctccaccaccctgaatgcttactgactgaataaaacgctgggtggtttgaagggctggtcacatgggccaccaggccacctcccgaacgtcagagcctcaggtcccctctccttcttctggtgaccaggcagacgcagaacccaagacatcacggacagcaagggatgtgcgctggctgctttatttaagggcttgtgattgacagctgtccccatcccagcccttgcttcctctacaaaagcaactgaacatgaaacgggcttcctggttaccatggggaggggggcggctccctgtcagggcccagcccagggacctggggaacggcggctttgaatccccggccacgggcactagaaggtggagaaggagagcgggaagtccagttgagatgggcacggtgctggtgaggaggctggagaggtcctgttccagcctctagtgggcttcccttgtccaggatgtcaggaaacagtcccccaattccgccggggggagccagagccccaaggctggggggccaggggctgcagggaacacagcaaaggctttcggagccaagtgagatcagttcaggcccctcaggcccaggaacccgacaccaccgcgtacctgtgagcacacactcacggccaccccagtgacacgtgcagccacacacacccacactcactcacacccacacccacacgcacacccactacacacacacacacacacacacacacacacacacacacacacacacacacggctgtgacagcccaggacccacaccctggacccctggaatgtctctggaccagaaccgaacagctggatccacagtacgcggggctgctcagggggcgggtcctctgtgtcgctactgattggccgcctcgcaggcgtctatccaatcactgtacacatccacgggttctgacagatctgggccacttaggtcaagggcgatcattggcattggaaccctgccctgcatcttctcaccccacagaaatcactaggtggcacctgttcctctggacggctttggccctgcaccagggcacacagtgggccagatgagcagggtccggactccagccccctccccaccctctggaaaaagcccaggtttccaaggatacacgttatgggcgtctggaattcctctaggcacacggtacaagagatgactccggtgttgcgggcacggtccctgaaacagaccaagagaagggactggtgagcaatgcgtcctgggcctgtgggtgatgacgccttcaccaagggaggcaaggggcaggatggagaacagcggggaagaggcagtggggaggctggatcccttgccctgttccccactcacattttcacatcacaggatttctcgtggttgcagaaggggcaggtgaactgggtctcgagggtgcctgtcatcttcttcttgggaggcggctttcgttttgactttctgcgccccatgtctgcaggtggatgagcctgtggggagtggcagatgtcagtggtttgaggaaaccacgcagcgccccagctcaatgctctagaaagcaggccggaaagagggtctgggacttgcaccgtggtcccggggcctctgcccttgagggacgaggccctcagtcctgatgcaggaggacaattccctgtcccactctggatggaaggggtgagacgaggctctaaccccatctctctcacttactgcgtgacctgggcaggttatttaagctctttgtgccacagtttcctcgtctataaaacagagacaaggccaggcatggtggctcacacctgtgatcccagccagcactttgggaagctaaggtgagaggattacttgatgccaggacctggataccagcctgggcaacatagtgaggcctcatctctaaaaaaaaaaaattaaaaattagccaggcatggtggtgcaggcctgtagtcccagctacttgggaggctgagatgggaggatcgcttgagcccaggagtttcaggtttcagtgatgatccagagttatgatccaggcactgcactccagcctaggcaacaggatgaaaccctgcataaaaaaaaaaaaagaaaaaaaaaaggccaggtgtggtggctcacacttgtaatcccaggactttgggaggctgaggcgggcggatcacgaggtcaggagttcgagaccagcctgaccaacacggtgaaaccccatctctactaaaaatacaaaaattagctggccatagtggcaggcacccgtaaccccagctactcaggaggctgaggcaggagactcacctgaacccaagaggcggagactgcagtgagccgagatcgcaccattgcactccagcctgggcaacagagcaagactccgtctcaaaaaaaaaaaaaaaaaaaaagtcgaaataaggttgctatctcagaggagacttgtggggctgacaccaggaatggtaagttaagtacttagcacagagctggcccatcatcgctggcgccaatacaaggaagccactgttcctggggagggtggcacaagagactccaagacaagccagctgttcagggccgggtggagcctaagagcctaggaactggtgattttattctggctgctcctcttggcaaaggacatgtaagtaccatccaggaggagtgacactcaggttatctgatggcctcgatccagatgacagactgcagggcagagaagtggggacaggcacttctgagtagaggaacactgtgtgaaggctcagggcagctgtccgtcccctggcaggtgagggagagaggagggacaggtgggagggttctgggtgtttggatggatcctgggagctacaaggagtgaaaggacaaagtcaccctgtgcttttgaggaactgcggtgtgagccataatctggatgaagacaaagtcacagccaggacagggctgttggggtagagatggcagagggtgagagagacagaggagacatggcggcagagtgagtgagtgtgacgagagaaggaaagtccaggatgactcccaaggttgtggcggggacatagtggctagagggacaaggtggcatcattctctgatgtctaacacataggaaggacagggttttggagaaaatgatggggttgggtggcagagggatatctaggaacagatgtccaggaggcaggtgggtggggaaacggcagcagttaccactgagcccaactcccctgcgaggcacggtgctcagggcactgtgtttgccatccctgagcctcctatggcgcctcctccaacacacacacacacgactgctggttctagcatcgttccactgtgacggggaggtcagcagcctgccagtgtcttccagaataaacagtggagtttcattcattatctgctgatcacttcctatgtaatacccccaactctttcttttttttttgagatggagtcttgctctgccgcccaggctggagtgcagtggcatgatctcgacccactgcaacctccacctcccggcttcaaatgattctcctgcctcagcctcccgagtagctgggagtacaggcatgcactaccacgcgtggctaattttttgtatttttagtagagatggggtttcaccgtgttagccaggatggtctcgatctcctgacctcgtgatccgcctgtctcggcctcccaaagtgctgggattacaggcgtgagccaccacgcccagccaacacccccaactcttaactgtgatgcttccagttcactgagtaaatagaagcaatccaaagacagctcctaggaccaactcattcagccattcacccaccctctttatttatctaagagatgaggtcttgctctgttgcccaggctggagtgcagtggcatgatcacagcttgctaaagcctcaatcctctggcctcagcctgctcagtagctgggacaacaggtgtgcaccaccatgcccagcttcggcatgcctcctttactatggaagtaagttcctgcaaaaacaatttgttcattctgccctggctcccatccccttttctttgagcaacatcaaattttccagctccactggatcactctcacacacttgttattacctctctcctcatttaaaaagggggaaaaaaaaactcttcatcctcttccagctatgatccttttctctgcaggctgttttagtgtacagccatctgcattcccacccatctctctgcaccccttgcctccaaacttaggttactggtggctccatactgcaaatcccaatggcagtcctcccattccagaggtccttcctcccctgagagcacatgtggctctcaggatgccatgtgctccctgtcctctgcctcactggtggctcctgctagtctcctatgctcctgcctctctgccaacttgctccaatgaagagagcacgtgagtttgggccaggcgctgtggctcacgtttataatcccagcactttgggaggccaaggtgggcagatcacttgaggttaggagttggagaccagcctggccaacatggtgaaaccccatttctactaaaaatacaaaaattagctgggcgtggtggcacatgcctgtaatcccagctaatagagaggctgaggcaggagaatcgcttgaacctgggagtcggaggtttcagtgagctgagattgtgccaccgcactccagcctgggcaacagagcaaaacttcatctaaaaaaaaaaaaaaaaaaggctgagtgcagtggttcacgcctgtaatcccagcactttgggaggccgaggtgggcagatcacgaggtcaggagttcgagaccagcctgaccaacatggtgaaaccccatctctactaaaaatacaaaaattagccaggcatggtggtgcacgcctgtaatcccagctactcgggaggctgaggcaggagaatcacttgaacctgggaggcggaggttgcagtgagccgaggcactccagcctgggcaacagagcaaaaagcccatgagtttaattgttggatcctctcctttctggctatactcaccacatgaagatttcacccagtcttagggcttcatgcctactctacactgaggccacctgcttctccagccttgagtctgaactgcagactctgatctatctgcctcagccacacctccacctgatgtctaacttccacctaagattaaacatatcatgtccaaaaccaagcccctgacattgcaacctgctcttccagtcttcctcatctcagctaacagcaattccatctttccggataatcaaatcagaaaccttggattcatcctcaatgtctttttccctcacacattccttatgcgatcctccccctgcccctctacctctgaaatataaattagccgcggcaccacgcccagctaatttttgtattttttgtagagacagggacccaccatgttgcccagcctggtctggaactcctgggctcaagagatactcccgcctcggcctcccaaagtgctggcgttacaagcatgagccaccgtgcccagcaataaccattactgaataaatcactcaatcagtttgcttgtaactctatcactttgggacgtcacgcccgtaatctcatcactttgggaggcccaggtgggaagatcgcttgaagccaggagttccagaccagcctgggaaacagagtgagacccttcatctctacaaaattacaaaaattagccttgagtctgtagtcccagctactcggcaagctgaagtgggaagcttgcgcccaggaggtcgaggctgcaatgagctatgatcgcgccactgcactccagcctcggcgacacagcaagactcactctcaaaaaaaaaaaaaaaagtccaaacaaaatctacggatgagccccagaagctcattttgcccagggactacagtctccccatcccatgaatggggtctggcttgcacaaggaatgcagaggcctcagcctgtcctgtgacaacgttaagtccaagagcgccaaaaggggatggcagaggagtcatcccccgaatctgctggtacccaagaggtggggggttggctgttcctccagactcactaaagcttcggcatcgcctcccgacggccgccgggaggagccaggcgtcccggtagtcgcgcttggaaggatggggtcggggggagtcagtctccccgaccggctttcccccaagctcgaggtcccaggagcctcctccaggaccccgtaaacgcacggagtagaggaacttccagtcctgcccacccccaacgcccactcgcacgagccgcaccagcactcaccttctccagctgcgaaagctccgttcacccgggagatagtgacttccgactcctgccggaagcggaaacccctctcctactttcaggtcccggccacccccatcccggacagcccagcaaataggccctgcctccttcgccgctcctctgagcgcacgcgtactcaaatagcagcgctccgacggagacgcagtgcgcctgcgcaagagccggtgcgtatttgcctgtacctacgcgcgatgccagtacttctggtcagtttccaggagcggcaagtgaggaatatgaaataaccttatggctgaatcagggtgaaggggaagcttgtaagcatggaagacgctctactcaaactaaaaagttcaagttctgatccagcagatgaagagggaggcctgagaggctgctgttctaactcgctcccaggtgacttccatgctgctgatccgcagaccacattttgagtgcccagattgtagtagatgaggttgagtggacaggctggggccagattccatggagcctcgtgggccgtgttaaggatttttattttttatttttgttttattttattttatttttttgagacggagtctcactttgtcgcccaggctggagtgcagtggctcgatttcggcccactgcaacctccgcctcccaggttcaagtgattctcctacctcagcctcccgagtagctgggattacaggcgccggtcaccgcgcccggctaatttttgtagttttttttttttttttttttttgagtagggatggggtctcaccatcttggccaggctggtcttgaactcctgacctcgtgatccacccgcctcggcctcccaaagtgctgggattacaggcgcgatccacccgcctcggtctcccaaagtgctgggattacaggcgtgagccaccgcgcccggccaaggacttttattggtttttatttttggttttgtttttttctgagacagggtttcgctccgtcgcccaggctggagtgcagtgacgccatatgggctcactgcaaccttagcctcccgggttcaagcgatcctcctgcctcagcctcttaagtagctgtgattacaggtgcgcactaccatgcctggctaatttttgtatttttagtagagatggggtttcaccatgttggtcaggctggtctcgaactcctgacctcaagtgatccatccacctcggcctctcaaattgttgggattacaggcatgagccaccacacctggcctgaaaaagatatttcaagatggagagagagaggggttagctgtgtcacgtgtccctgagttgaagaagatgaggaaagagaattgacagttgagtttggcaagggtctggtccctgcggaccttgataagagctgttgcattagagtgttcaggaagataatttgtaatgaaatgtatttcgaatacagatgctctttgatttacgatggggttacatcccgataaacctatcataatcaagtcaggggctgtctgtagagggatctctaggatatcccctagggggcagtgttaccctggtaaccgtcaagtgtaaccagtagaactgccctcttgtgagaccctttttcagtgctggagcaaactagaatacacacaggatggaatcatactatacagttaccgtgcaacttgctatttccacttaaccatctatacacgtatacctaacttttgtttttagtagctacatgattcatagtgcaactctgccatagtataatcaacggttatcctactgatggacaattcctggactttcctgagttttgccactgtgatgatgcagtaaatgtccctgaatcagtatccttaagactggatctttagtgaagcatagttttcaaaaaatgacatttgtgagtacagtgtctcaccccagtaaccccagcactttgggaggccgaggtgggaggactgcttgagcccaggagtttgaggctagcatgggcaacatagtgaaatcctgtctctaaaaataaaataaaataaaataaaaaacaataaatgatggccgggtatggtggctcacacctgtaatcccagcacttttttgtttttgcttttttttttttttttttgagacagagtcttgctctgtggcccaggctggagtgcagtggcgtgatctcggctcactataacctccacctcctggattcaagcaattctcctgcctcagcctcctgagtacctaggattacaggtgtgcgccaacatgcctggctaatttttgtatttttagtaaagatggggtttcaccatgttggccaggctggtcttgaactcctgacctcgtgatctgcctgccttggcctcccaaagtgctgggattacaggcgtgagccacggcgcctggcccatcccagcactttgggaggccaagacgggtggataacctgaggtcaggagttcaagactagcctgaccaacatggtaaaaccttgtctctactaaaaatacaaaaattagctgggcatggtggcaggcacctgtaatcccagctactcaggaggctgaggcaggagaatcacttgaaccccgggaggcagaggttgcagtgagccgagatcgcgccactgcactccagcctgggcaacaagagtgaaactccatctcaaaaaaaaaaaaaaaacaaagacattgagtcacaggatgtatatatctttcattttgttcatgattgccacattagttttctctttttctctcctttcatcccttccctctcttacttccctccttcccagctttgttggatgtaattgactgaacatgaactgctcatatttaaaccatgcctggccgaaattgcatgttttgacatacaggtatatcattaaaacatgaccataatcaagacaattatttccatcaccctaagaaatttcctcttaccagtagccgagtgtgatggctcatgcctgtaatcctagcaccttgggaggccgaggtgtgcgaatcacgtgaagacaggagtttgagaccagcctgggcaacacggtgagaccccttgtagtctccactacaaatacaaaaattagccagacatagtggcacacgcctgaagtcccagctactagcgaggctgaggctggagaatcacttgaacccgggaggcggaggctgcagtgagccaagattgtgccactgcactccagcctgggtgacagatcaagactcagtcttaaaaaaaaaaaaataagaaaaaaaagaaatttttctcttgcccttttgtgctctgtcccctactccagcccctggccctaactgatttgtttttggttcctgtaactttgtctttttcagaaagtcatataagctgaatcatacaacgtgtagccttttgagctgggcttctttccccagcataagatgtttgaaactcactcatgttcccagcattttgggaggccaaggcgggtggattgcttgaggtcagaagttcaagaccagcctggccaacatggtgaaaccccatttctactaaaaatacaaaaattagctggatgtgttggtgtgcgcctgtaatcccagctacttgggaggccaagccaggagaatcacttgaaaccaggaggcggaggttgcagtgagccgagatcacgctattgcactccagcctgggcaacagagccagactctgtctcaaaaaaaaaaaaaaagaaaaaaaggaactcactcgtgttgttggatatgtcagcagtttgtttcttttttgttttcttttgagatggggtctcactctgtcacccagactggagtgcagtggcaccatcatggttcactgtagcctcaacttcccaggctccagcagtcctcccacctcagcttcccgagtagcggggattacacctgtgcaccaccacgcccagttaatttttgtgttttttgtaaagacaaggttttgccatgttgcccaggctggtctcgaactcctggactcaagcaatccacctgccttggcctttcaaagtgcttggattataggcatgattattattcagttgtattctgttatatgaatgtcccacactttgtttatcttttcacctgttagtgacctgttttttgcattgttgccggttgttgaacaattattagagctgttatgaaccatttctttcattttgagggtggcagatgacaccactccaaaatatgccactttggcatatggattgtttcagctaagtgcacttgaaaaacagtaggtgcaggaaaagcactctgacctccctcttttctctggaaaacgagataaacccccatatggaagatgccctccccatcccaggaagaaagtaaaattctttttagacagggtctcatcctgttgcccaggctggagcgaagtggtgtgatatccacttcctgcaacctcactgcaacctccacctcctagtcttaagcgatcctctcgccttgtccccaaaatagctgggatcacaggcgcccaccaccatgcccagctaatttttttgtatttttggtagacacagggtttcactaagttgcctaggctggtgtccagctcctgagctcaagtgatccacccgcttctgcctcccaaagtgctgggattacaggcctgagccaccgcgcccagccctagagcgtacaattcttatcaccagaagacagggagtcaaagctgaggaaaaaatgtacaaacaaaccttgttaaatgaacccttatttttctagttatttttccaccattaactgctctagcccaaacccctttgtcttgtcacattttcataatttactacccttttaaaactttatttataatatttatttataattttaaaatttatttatatatttatttagagacggggccttactctgctgcctaggctggagtacagtggcacaatcatagctgattgcagcctcaaactcctgggctcaagcgaaactcccacgtcagcctcctgagtacctgggactacaggtgcgtgccacccagctaattttattttctgttgttttagagatggggtctccctgtgttgtccaggctgttcttgaactcctgggtccaagcaatcctcccaccttggcctcccaaagtgttgggattactagtatgagccaccacgcccatctataatttactactttttttttttttttttttgagaagtctggctctgttgcccaggctagagtccagtggtgcgacctcagctcactgcaacctttgcctcctaggttcaagtgattcttctgcctcagcctcccaagtagctggaattacaggtatgtgccaccatgcctggctaatttttgtatttttagtagaggtggggtttctccatgttgattaggctggtctcaaactcccaacctcaggtgatccgcccaccttggcctcccaaaagtgttgggattacaggcatgagccaccatgtccatccataattttctactgtttgtctaatacagtaaataagtgtttgactgtaactgcttctttgggtcttccttttcagggctcccatgtcccatagaacttatgttaaatatatttctatgcttttctcctattaattgatcaaatgtcagtttaagtcttaggccccgccagagatctaagagggtagaggagaaatcttgccttccctccacaggtctttgtgtggatgttcatttgcatctttccctgtgattgcttgcttgcttgcttgcttgattgattttgagacagggtctcactctgtggcccaggcggaagtacagtggcatgatcatgactcactgcaggcttgacctcccaggctcaagtgatcctcccaccttagcccctgccccaccctctccaccccaccctctcaaccccctgagtatctggaactacagataagcacctccatgcctgtttacttttttatttttattttttatttttggtagagatgggattcactatgtttctcaggctggtcttgaacccctaggctcaagcaatccacccaccatggcctcccaaagtgctgggattacaggcatgagccaccacatcctgcctccctgaaatatttgattccttcggaatttatttttgtatgtggtctaaggtagggttcaggttttgtctcattctagtgcaaactgacaaggcaaataacacctccttttccatgaagttgcaatgcgaccttgaacctatattatgttcttaaataaatcttcctgaatttgttcttggattccctcagtattttcctgagtcaatgctatattgtttttgtatttgtttctactttctctcttgatattttcccgagccaatgttttgttttggtttttttttatttttttttattttagagataggatctcactccatcatccaggctcaggctggaatgccgtggtgtgatcattgctcactgtagcctccagcacctgggctcgagggatcttcccacctcagcctcctaaatagctggaactacaggcgtacacctccatgcctggttaatttatgtattttttttttaagttggggccttgctatgttgcccaggctggtcttgaattcctggccttaagtgatcctcacatcttagccttccaaagtgctgggattgcaagtatgagccaccacaccttaccctgagtcaatgtcaatgtccttttttttttttttttgagacggtgtcttgctctgtcacccaagctggagtgcagtggcgcaatctcggctcactacaacctctgcctccagggttcaagtgattctcttgcctcagcagcctcccgagtagctgggattacaggtgcccaccatcacacctggctaatttttgtatttttagtagagacagggtttcgctatgttggccaggctggtcttgaactcctgacctcaggtgatccacctgcctcagcctcccaaagtgctgggattacaggtgtgagccaccacacctgaccctgagccagtgtgttactattttgatgactgtatgttttgctattggtaaggcaggtatctcaccttcttattcatgattcttggcctgggatgctgtttaggaagtggacatggcctgagtgtcaagtgacagacagcctactggctgcatgagaatgccagtccctttttcagcctctagtttgacaagcagagtggcaagatgatagtgtctgtgacagctgaaatcaggagtggttggttgctcaggaggatcgagaagagatgaaaccctgccacttgcctgagggactctgctgtctcgtttcttgcaggttaaaaggcatctttccaaaaatggctgaacctggtgtggtggctatgcctgtaatcccagcattttgggaggccaaagtgagaggatcacttgaggacaggagttcaagaccagtttgggcaacctagggagactccatctctctttttttttttttttttttgagatggagtcttgctctgtcgcccaggctggagtgccgtggcgcgatcttggctcactgcgagctccacctcccaggttcacaccattctcctgcctctcagcctcccgagtagctgggaccacaggcgcccgccaccacgcccggctaatttttttgtgcgtgtgtttttagtagagatggtttcaccgtgttagccaggatggtctcgatctcctgacctcgtgatctgccctcctcggcctcccaaaccgctgggattacaggcatgagccaccgcgcccggcatttttttttttttttttggagacagagtctcagtccattgcccaggctggagtgcagtggtgtgatctcgactcactgcaacctccacctcccgggttcaagcagttctcccaccttagcctcccaagtatctagggttataggtgcacaccaccgtgtctggctaatttttgtattttttggtagaggagggatttcaccatgttgaccaggctagtctcaaactcctgacttcaggtgatctgcccgccttggcctcccaaagtgctgggattacaggcgtgatgtaccatgcccgaacaccatttcttaaaataaataaattaggccgggtgcggtggttcatggctataatcccagcacttcaggaagccgagatggacagattgcttgagcccaggagttcaagaccagcctggacaaagtggtgaaaccccctctctacaaaaaatacaaaaattggctgggtgcagtggctcacgcctgtaaccccagcactttgagaggccgaggtgggtggatcacgaggtcaggagatcgagaccatcctggtcaacatggtgaaaccccgtctctactaaaaatacaaaattagctgggcatggtggcgcacttacctgtagtcccagctactcgggaggctgaggcaggagaatcaattgaacctgggaggtggaggttgcagtgagccaagatcaggccactacactccagcctggcgacagagcaagactctgtctcacggtgaaaccccgtctctactaaaaaaaaaaaaaaaaaaaaaattagccgggcgtggtggcgggcgcctgtagtcccagctactcggagaggctgaggcaggagaatggcgtgaacccgggaggcggagcttgcagtgagccgaggctgcgccactgtactccagcctgggtgacagagcgagactccgtctcaaaaaaaaaaaaaaaaaaaaaaaaaaaaaaaattagccaggtgtggtggtgtgtgcttgtagtcccagctgttcaggaggcttaggtgggagggaggattgcttgagccccggagacggaagttgcagtgagctgtgatcacactactgtactccagcctgacagcctgggcaacagagtgagaccctgtctaaaaaacagaaaagtaaagaaaaaaataaaataattaattaagatggctgagtgctggctggtgttgtctcctcagcaagacagaagctccctgagggccagcgcccaccctgatttattcctcctagtgtccttgggtccccagctgcctggcacagagctttggtccttggtgctcggtagaagtgtctggctgatgtagaggagggagcctgagttacaatcccccctcccctgccactcagtcttcgtgtgacattggatgtgtcacttcttctttctgtgctctgggccatgagaacggggtccttgggctatgatggtgacctctgattcagactcctgcctgtctggtgcctctgagtcagtgagaagagcgcggctgtgacctccctagactgttgtggttaagattgagggactgccacttcctagaaattaccttggtcacagtggttaagccgtccaatctaagataaatattgtaccaaaaaaaattaaaaaataaaaacccacaaaaacacgtctgagcttctgtaatagcctctgagaagcaaggatgattctggcccctgcctcatgggccaggatcagaagtgacggtaaatggcagctggaacaaactcaggattacattttggggatttgtttgtttgcttgagacagagtcttgctctgttgcccaggctggagtgcagtggtacgacctcggcccactgcaacctccacctcctgggttcaagtgattctcctgtctcagcctcctgagtagctggaattacaggcgcccgccacaatgccagctaatttttgtatttttaatggagacagcgttttgccatgttgatcaggctggtctcgaactcctgatctcaagtgatctgcccgcctcagcctcccaaagtgttgggattacaggtgtgagccaccacccctggccaggattgcattttggaaagatcactgcttaattataacagttggccagacatgatggctcacacctgtaatcctgcattttgggaggctaaggaggaagaatcacttgaggtcaggagtttgagaccagcctaggcaacatagcaagaccccatctctacaaaacacacacacacaaaattaaccaagagtggtggggtgaagctgtggtcccagccactcaggaggcagaggcaggaggatcccttgagctcaggaggtggaaactgcagtgagctatgattacaccattgcactccagcctgggcaacagagtgagacactgtttcaaaaaaaaccaaaaaattgtaacagtaacacatacaccttgtaacaaattcaacagtattgacatctataaagtagcaaattataccaagatacacacacacacacacacacacacacacacacacacgcgcgcgcgcaaagtaacaaataagccggagcagtagctcatgcctgtaatctcagcactttgggaggcctaggcgggtggatcacctgaggtcgggaattcaagatcagcctgaccaacatggagaaaccctgtctctactaaaaaatacaaaattaaccaggcgtggtggcgcatgcctgtaatcccagctactcaggaggctgaggcaggagaatcgcttgaatctgggaggcagaggttgctgtgagctgagatcacgtcactgcactccagcctggacagcaagagggaaacttcttctcaaaaaaaaaaaaataagtaaaataacaaatgaaaggtgacaatttcaccaagtgcctctccccagaagtaacctcagttacttttttttttttttgagatagtctcccaaactggagtgcagtggcgtgatcacagctcactgcagcctccacttcccagacaagaacgattctcatgcctcagcctcccaaatagctgggattataggcatgcatcaccaggcctgactcattcttttgtattttttagtagaggtgggtttttgccatattggccaggctggtcttgaactcctgtcctcaagtgatctgcctgcccctacctaccaaagtgctgggattacaggcatgagccactgcactcagccctgtttacattttgtccagattcatttcactccgctaggcaggcagctggagccaaacaactgggtccctgccgtgtagcagttgcaagtggcggttgagggtgggccaaaggaggggttcctgtgccttgcctagcgctaatggcctgggttgcctgggggtgggtgttacttaactctccctcagaggggaactgggctcccctgcaactgtcacatcaggtctagcactctgctttcagtataagaaaaacaggccctgagatttttttttttttttttttcccctgaaacggagtctcattctgtttcccaggctggattgcagtggtgtgatctcggctcactgcaacctctgcctcctgggttcaagcgattctcctgcatcagcctcagtagctgggattacaggcacgtgccaccatacccagctaattttttgtatttttagtagggatggggtttcaccatgttggccaggctggtctccaactcctgacctcaagtgatctgcctgcctcagcctctcaaagtgctgggattacaggtgtgagccactgtgcccagccctgagataattctccttctagaagttttcttacacattactttcacagcattggtccagggaccaccactgcagccttgttggtaagagggaaacaattatttatttatttatgtattttgagaaagagtctcgctctgttgctcagtctggagtgcagtggcgtcatatcggctcactgcaacctccgcctcccgggttcaagcaattctctgcctcagcctcccaagtagctgggactacaagcacacgccaccatgcccagctaatttttgtatttttagtagagacggggtttcactatattggtcaggctggtctcaaactcctgacctcaggtgatccacctgcctcggcctctgaaagtgttgggattacaggtgtgagccaccatgcctggcctagaaggaaagatttaaaaagaccacggctgggtgcggtggctcacgcctgtaatcccagcactttgagaggccgaggtgggtggatcatgaggtcaggagttcaagaccagcttggcaaagatggcgaaaccccatctctactagaaatacaaaaattagctgggcatggtggcgtgtgcttgtagtcccagctacttgggaggctgaggcagagaattgcttgaacccgggaggcggaggttgcagtgagccaagatcgtgccactgcactccagcctggctgatggagtgagactccatctcaaaaaaaaaacctcaatgaggctgagcactttggcactttggctcacgcctgcaatcccagcactttgggaggttgaggcaggaggatcacctgaccctgtgaatttgaggctgcagtgagctatgatcctgccattgcactctagtctgagtgacagagcaagattctgtctctcaaaacaacccccaaaaccaataaaatcctgcaaggggcactagcaaggagccagtgacataaggcagaagcttcgtggctgtcaaaaagaagtgcgatctttttccttgttcctgggaatcctgcaaacatgtctgccccataggtaatgcgtagacaaggtcatttgttatgacattgaggattgcaaaattgttcgaagtgttacaggaaaggggtctcgatccagaccccaagagagcattcttggatcttatgcaagaaacaattcaggactgggcacagtggctcatgcctgtaatcccagcactttgggaggccaaggcaggtgaatcacctgaggtcaggagttcaagaccagcctgaccaacatggtgaaatgccgtctctactaaaaatacaaaattagccaggcatggtggtgggggcctgtaatcccagctacctgggaggctgaggcaggagaattgcttaatcggttgaacccaggagatggaggttgcagtgagccaacattacacccatgtactccagcctgggtgacagagtgagactccatctcaaaaaagaaaaaaaaaaaagtggagtgcagtaacgggaatgtgtgcagaactatgtgtatattgtgttgcttttggtgtaaaaaatgggaatgtgtttgcagtggcatgcccctgtaatctcatctactcgggaggctgagatggatcacttgagcccaggagctcaagaccagcctgggcaacatagcaaaactctgtctctgaaaaacagtctggaagcaatagctcatgcctgtaatcccaacactttcggaggctgaggcaggaggattgcttgagcccaggagtacaagaccggtttgggcaacagaacaagactcccatctctacaaaaaaaaaaaatctaaaaattagttaggagtggtggtgcgtgcctgtagtcctagctacttgagaggctagggtgggaggatttcttgagcccaggagtttgaggctgcagggagctatgattgcaccactgcactccagcctggacaatatagcaagacccctctccctaaagaaataataggccgggcacggcggctcacgcctgtaatcccaacactttgggaggctgaggcgggcaggtcatgaggtcaggagattgggaccatcctggccaacatggtgaaaccccatctctactaaaaatacaaaaattgccaggcgcggtggctcactcctgtaatcccagcactttgggaggctgaggcaggcggatcacgaggtcaggagattgagaccatcctggctaacacgatgaaaccccatctctatttaaaaatacaaaaaacgagccgggtgtggtggcagacgcctgtaatcccagctacttgggaggctgaggcaggagaatggtgtgaacccgggaggcagagcttgcagtgagccgagatcacgccgctgcactccagcctgggcgacagagcaagactccatctcaaaaaaaaaaaaaaaaaaaaaaaaaattagctgggcgtggtggcgcgtgcctataatcccagctactcaggaggctgagccaggagaattgcttgaatctgggagttggaggtttcagcgagccgagctcacgccactgcactccagcctggtgacagagtgagactccatctcaaaaaaaaaaaaaaagaaaaaaaaaagaaaataataaagggaatgttttgattatggaggcatagactatatagagaaagaaaatgattaatattagttgcccctggggtggaggaagacttgctttatgttgtacccttctttctgcttggattttattgaattaattttttttttgagacagagtcttgctctatcacccaggctggagtgcagtggcacaatctcagctcactgcaatctccgccctcacctctccaccccctttacccgcaaaccccctaggctcaagtgattctctcgcctcagcctcccaagtagctgggattacagtcatgtgtcaccacgcctagataagttttgtatttttagtagagatggggtttcaccatgatggccaggctggtcttgaacttctgacctcaagtgatccgaccacctaggccttgcaaagtgctggcattacaggtgtgagccatcgtgcctggcctattttatttacttattttttttgagacagattcttgctctgtcacccaggctggagtacagtggcacaatctcagctcattgcaacctccgcctcctgggttcaagcaattctcctgcctcagcctcctgagtagctaggaccataggctcctgccaccacaactggccaatttttttttttcaggcagagtttaactcttgttgcccaggctggagtgcagtggcgcaatcttgactcactgcagcctccacctcccagatgcaagtgattctcctgcctcagactcccaagtagctgggattacaggcactcgccagcaagcctgactaactttttgtatttttagtggacatggggtttcactatgctggccaggctgatcttgaactcctgacctcaaataatccacccgctttggcctcccaaagtgctgggattacagatgtgaaccactgagcctggcctctgcttggattttattttttttttattttttatttttttgagatggagtctcgctctttcacccaggcaggagtgcagtggcgctatcttggctcactgcaagctccgcctcctgggttcacactattctcctgcctcagcctcccaagtagctgggactacaggcacccgccgccacgcctggctaatttttttgtagttttagtagagacggggtttcaccatgttagtcaggatggtctcgatctcctgacctcgtgatccgcccacctcggcctcccaaagtgctgggattacaggtgtgagccaccgtgcctggccgggttttataatcacatccatggataaggcaacttggtcatggatggggtaagagatggaggcaaggaacagcagctcaggggagcccagccactctaaccaggagaacataacacaccagtggcactggttcagccttggcaactattcttttattgaacatcagtaacagaaagatgcttgatttaggaggaagctttccctccctccctcccccattgcaccccggaactcagcaaaggtgagccagccacagagcataacactgtggctgggacacatgtccatgtgtgtttcacatacgtgggcatctgtgccacaagggtcatgtggcaccacagttcatcagctgtgtttccccttcctgccctgctgcagcgccacaggttggaggaaaagcctgcctgtgagcagggtcccggcagggcccacccacccaacagtggagatcgggcctcagagctgggcagtcatgggagttcagggcctggctcgcctcggcagcctggtcttaaagagggacttgcccgaggcctcgatgtaagtgacagtcatctctttggagctgatctccacataggcaaagccacccagtgagtcttcagtcccatagtggaagcgcagatagccgttggggaccttgcgctggtgccgctttgaggggtccatgaaattcccagccccactcagcacgtagcccacgccattctcatcttgcaggtactgaggatggaggacaaggggtcagtggagacccagctttgagcagagccctgcctaaggtccagggctcgatctggccctaaccacagagtcaccttgaggtatgtaacccctcctggcttcaatttcctgacttttaggagtgtattaatcctatttcataggtagagcacttagtaagaaattggtggccaggtgtggtggctcatgcctgtaatcccagcactttgggaggctgagggggtggattgcttgagcccaggaatttgagaccagcctgggcaacatagtgagaccttgcctctacaaaaaaaatgcgcaagggccaggtgcagtggctcatgcctataatcccagcactttgggaggccgaggcgggcagatcacttgaggtcagaagttcgagatcagcctggccaacatggtgaaaccccgtctctactaaaatataaaaattagcaaggtttggtggcccatgcttgtaatcccagctacttgggaggctgagacaggagaattgcttgaacccaggaggcggaggttgcagtgagttgagatcgtgccactgcactccctctcaaaaaaaaaaaaaaaagcaaaaattagctgcatgtggtggcccatgcctgtagtgtcagctactctggaggctgaagtgggaggttcacctgagcccgggagattgaagctgcagtaagccccgattgcaccactgcactccagcctgggtgaaaaacaatgaaaccttgtctccaaaaaaaaaaaaaaaaaagagcttaaaaaagaaagaaagaaagaaattggcaattcgaagatattattctggctttggagtgttttcctggttagacagcaagatttgagggacagtctagacattctgaaggccacaggagaccctcaaacagcaggaggaccccagccatgtggacatcagctgggatggggacccccctcacccagctcccaccccacccacagggccctcacctgcagattgtgatcgtggccgcacaggtaggcagtgaccccgtatgtggccagcagtggccgtagctgcttgaccaggcagtgggtaggcccgtgctcggctatggaccacacggggtagtggccagccaccagcacgtagtcctccctggccgccgccagctgtttcttgagccaggacagctgtgtgcgggccagcttcacgtctcggggcctctcaggctgctggctgaggaagtcatctgagttgccacatagtgtcactgtgtccagcataaaaatggccacagacacattggtctgtgggatcttgaagtgcaggcggtagaaagggctggggaagttcctgtggaggggatagaggtcgtgggtgcacatcttgggcgcagaagtcccagggtcagctcaagccacagggcccctgtgtccctgctatgtgaggatctcggaaggcagggctgagggtggctcaccagcgcttggagatcttagagtatgcaatctgggcagagacattgccaaggtggtcatggtttccggctagcacgtaccagggcactttgcgaagggagcggtcagagaatacgtcctcaaaggtctcctgtagcaaacagatagggcaggcctcttccctggggtcagtggctatgccgatcctcccaccaagtcaggataagggagacactgaatgctcccggcgcccaaaggtgccccatcaccttccctctgccctcaccaaaggaaggtcactaggtaaggcggcttctccccactgcccgcccccacctcctgccccactctgttgggcacagacctggaacctcttgtcattgatgtcttgcacaccagtgaagtaaaaattgtcccctagagacaggatgaagtctgcacccaggatctgcacagtccgagcgatctccttggcattggccatttcccgggccgtgtggaatggggcattggggacccctccccagtcacccacggctacaaagcgcagggcaggggtggcaccatcagccagggagggtagcaacaaggcttgcaggatgagcagcgccgtccacatgtccatctgggagaagagagacaagcataggtggcccgggctgtgacaagggcagggaggccttgagacccccgcctgccctgagatagagggagactgcttgctgcaggctgcccctgcgggaaccccttggtgccctaattctcaggacacacaagctgcacaaggctgcacaagctggcttagggaaggggggcgcggtctgtgagagggcgagctgtaccaagatggccctgcaggcccatttcaccctccttccacctagcctgcccagcactcacccagggggagacacaggccagtcaccggaggctctgagaggctggtgggctctagagtagaactgccggtccctgagcctttattccctgaggaggaagtggatcattagtgaggatgatgcagtttctccgagggctgtcccgggagccctccccttgggtcatgtgagccctggacttccctggagcaggacacgggattggggtgggggtgggaggatctgggcacacgtgtgcagcagcctcggcccacacagcctccgggtggacctgcaggggcctgtttgtgctgtaggcttgacacgtccaggtatctctgtgtgtctgtgtatctcagtgtgagtgtgtgtgtgtgtgcacacttgagaggctgtggctgtgattacccaagacacatctcctgcaccttctttctctgagtaagggcttacctgtgtgtgtctgggtgtgtcttgcttcctgcgtgcagctgagcatgcctacctgggcctcggctctgtacctgatggtgttgctgcagacatgtatgctgagcctgcgaggcctgtgtggcttgtctgcgatgcacgcctgtgttctcacgtggcactgggtgggaatccctatggatggagttttgtgtgtgtccatgtgtgtgtgcctgggttgcatctctaggatgggttgcgtgtctggtgtgggagctgtgtttgacaacatctgggtgggggactccgcgtgtgtccccgtcctccccctgccctctctccatcccacacataaacaccaacgggcttcccttttccaggaagtcctgcccacaccctcccctccccccagactcccattcctgcaggaggaaccaggcaggaggcagctagctggtgatagcgcgcgtgaccacagacctctgaccctcatagtctcagcagctgtctgcaggccctccacgggaccgcagcctgggagggcaggaggccctgcacctgcggccggtctgacctgctcctcacctccctgcctgcctcctccgtgctgggcgccgccgcgacacgtcccgcggacattcaggagtcccttcagtccctgcgagcgcggacccgggagagagctctcattcaacgctgaggccactggctcacagatctccccgggtcaccctgcgaagtgcttggtcccccccattcccagccctgcagcagcaacaaacgggaaggaagtgggtgacgaggacaggcagagacccctcccacggggccgcccgcatctcacctgccgtcgcggggcgggcgttgcggccggtgcccagctgcagatccgcaggcgatcgcactcctggcggccccagctttaagcaggcagcggccgatccgccctgctcgagggctcagggctgacccaggtgagccccggcggggagggcgggcgcctcggcctccccgccccggaaccctgcaccgcccagagccgccacgcctcccggctgtaggctccgcatctgtaaaatgggccgatgaaccccaagggtcggctcagacccacggactgcagctgcagctgggctagaaggggtggccaggggagccgatttcatccttttccttcctccacgccaaccaggagcctccatctgcctgggaccctttgggggcacccatgggcccacagccgcagaaccacagcactgggtggggtttcagccctggggccaagctcttgtgaggtctgtcatcatcttctcctgttgttttgtttttttgtttgtttgtttgtttggtttttttttttttgagacagagtctcgctctttcacccaggccggactgcagtggcgcgatctcggctcactgcaagctctgcctcccgggttctcgccattctcctgcctcagcacccccgagtagctgggactacgggcgccgccaccgcgcccggctaattttttgtattttttagtagagacggggtttcaccgtgttagccaggatggtttcgatctcctgacctcgtgatccacccaccttggccttccaaagtgctgggattacaggcgtgagccaccgcgcccggcctgtttttgttttttttttttttgagacagttttattctggttgcccaggctggagtgcagtggcgcaatcttggctcacgcaacctccgcctcccgggtacaagcgattctcctgcctcagcctccctagtagctgtgattacaggcacgcaccaccacgcccggctaattttgtatttttagtagagacggggtttctccatgttggccaggctggtctccaatgcccgatctcaggtgatctgcccacctcagcctcccaaagttctgcgattacaggcgtgagtcaccatgcctggccagtctcctgtttttttaaaaacttattatttagccggtgtggtgtctcacacctgtaatcctggcactttgggaggccgaggtgagcggatcacttgaggtcaggtgttccagaccagcctgggcaacatggcaaaaccttgtctctactaaaaagacaaaaattagctggaggtgctctcttgaacccaggaggcagaggttgcagtgaactgagatcatgccactgcactccaacccaggaggaggaggttgcactgagccaatatcatgccactacattccagcctgggcgacagagcaagactctgtcccccccaaaaaaaaaacagaaaaaaaaaaaaagaaagaaatctgaagcaattatgaccaaatgttaacatctgtttcttcacgtggtgggtacaggcgtgttttggaagcttctatgcttcctgtattttgagatcacacaaaattatgtttattatcttattgtgctacatgatctttgtagaaaagttggtaaattctggaatgcacgaagaaaaagattataatagccagtaatacccctgcccagagagacagtatccattaatttttctctgcctatgtttgtcttcggaaaaatgggatactattggcactattttataactttttaatttgtattaacactttctatattttttaaattgaaaaagctggccaagcatggtggctcaggcctgtaaacccagccaatgtgggaggatcgcttgagcccgggagttcaggaacagcctgggcatcgtggcgagaccacattgctacaaaaaaaaaaaaaaaaaaaaaaaaaattagccaggcatggtggtgcacacctgtggttccatctactcaggaagctgaggtggaggatcgcttgagcctgggagtttgaggctgcaataagctacgaatgcaccactgaccttcagcctgggcaacacagctagactcttgtctcagagagagagagagagagagagagagagcacaatgaaaaaaataaacctgatcttgcacagagcatgtaataaaacctgtgcgttcttggctatctctctctggtctcctccagggtgctgaataagctcttctctctccattcacccaggagaactctcttctgctgattttctgtggagctagatcaggctgtgactcagaatctccctccacctccaccctttcctattttcccaacaccagtgtcaatctcagatgtcaacaaccccacgagtgagttcctcctgttgccaatacatccaggtcctgttctccgctgctgtctctacccaatcccttcccttccttcctcctgccaatcctgctttccctgtttcttgctcctctgacctcctccgcattgcttgactgtctcagatacactctggcctcagggtcttggcactttctgttctccctgcctggaagggtcttccttagtcagatactgaggtcacccattgtgttcaagttcctttaatttatctgaaatgagtctgggcgtggtggctcacgcctgtaatcccagcactttgggaagccaagccgggtggatcacttgaggccaggagttcgagaccagcctggccaacatggtgaaaccccatctctactaaaaatacagaaattagctgggcgtggtggcacaaacctgtggtcccagctactcaggaggtcgaggcaggagaattgcttgaacctgggaggcggaggttgcagtgagccaagatcgtgccactgtactctagcctgggtgacagagtgagactctgtctcaaaaaaaaaaaaaaaaaaagaaaaagataatttatctgaaattatctgaaatgcaccaccctgcccccatcattgactctcctgttgctgtagttttctctgcagcacttaccagtgcttgagaaaaccacccactcatttatcttgctttcagtttctcttgctttcagtctgtcttcagttaatgaaagctttttttttctttcttttttctttttctaaaacagagtcacccaggctggagaccagtgatgcgatcacggctcactgcagactcgaccttctgggctcaggggatcctcccacaccccttggcctcctggggattgagactacaggcacacaccaccacacccagctaatttttgtattttttgtagagagagggatttgtcaccttgtccaggctgctcttgaactcctgagttcaagcaatcctcccaactcagcccctcaaagtgctgggattacaggtgtgaaccactgcccctggcctgtttatttaaaaaattaacattcattctcagtttattggctaagtttagaagtagtatcagaatgtttaagagaacttactgttctccttttatttgtatgtttgcattgtagatttttaataactgataaggacttctcaaggtgtttgcttggtggagacatttaaaaagattaaagaataggccaggtgcagtggctcatgcctgtaatcccagcactttgggaggccgaggcgggtggatcaagaggtcaggagatcgagaccatcctggctaacatggtgaaaccccatctctactataaatacaaaaaattacctgggtgtggtggcacgtgcctgtagtcccagctactcaggaggctgaggcaggagaatcgcttgaacccgggaggcagaggttgcagtgagctgagatcgcaccattgcactctagcctgggtggtagagcaagactctgtctcaaaaaataataataataaattaaaagattaaagaataagctggcacagtggctcacacctgtcatcccaacactttttgtagagacctcatctcttaaaaataaaattagctgggcgtggttgtgtgcacctgtagcccagctactcaggaggctgaggtgggagcattgctcaggaggtcgaggctgcagtgagccatgattgcaccactgcactccagtctgggtgacagagctgatacactgtctctaaaaaataataataattgaccgggcgcagtggctcacgcctgtaatcccatcactttgggaggccgaggcgggcggatcacgaggtcaggagatcgagagcaacatggctaacacggtgaaaccccgtctctactaaaaatacaaaaaaattagctgggcgtggtggtgggcgcctgtagtcccagctactcgggaggctgaggcaggagaatggcatgaacctgggaggtggagcttgcagtgagccaagatcgcgccactgcactccatccggcttgggtgacagagcgagactccatctcaaaaaaaaaattaataataataattattattatagtagtaaaagagtatagaataaaatgcatcacacttataaaatgtaaaatgttaatttcaatccactaaacttataaacggacccaaatatgcatccaatgacctcttaaagtgatatttctttttctttttgttgagatggagtctcactcactctgtcacccaagctggagcgcagtggtgtgatcttcagctcgtcccaacctccgtctcccaggttcaagcgattctcctgacctcaagtgatccgtctgccttggcatcccaaagtgctgggattacaggcctgaggccaggccctgaattaattttttgatgtttcactttgccaggtgtataagtaacatgttagttgtgattgtaactaaataaaggcttaagggaaaccgtgtttctaaatttctaaattgactacacatttacaaaggaacccacaaagatggatttttgggccgggcgcagtggctcacgcctgtaatcccagcactttgggaggctgaggcagacagattgcctgagttcaggagttcaagatcagcctaggcaacaaggtgaaaccctttctctactaaaatacaaaaaaattagctgggcatggcagcgagcacctgtaatcccagctacttgggaggctgaggccggagaattgcttgaaccagggaggcagaggttgcagtgagtcgagatcacaccaccgcactccagcctgggcaacacagtgagactcgatcttaaaaaaaaaaaaaaaagatggactttttcggggccccaaggcttcaaaattcaaaatgctgtcatgagttagtttgatttgaggaaccaaaaattggcttttgtggctggagcagagtgagcaagggggaagtgaatccggaaggttgagtctgcaaggtcaagggcaaggaacagagaagggtgtgggtggggcaggttgcgtgtgctcttgggggctgcagggaagggggcttttatctgggtaaggtgggagccacagagggttctgatcagagggacagatctgacttagattttgcatgatgtcccccagctgtgggctgcggggcatgggctgctgaataggtggtttaggtgggcaaagatgggtcatggtgccccctaccctttaaaaattaaaagacagggccaggagcagtggctcacgcctgtaatcccagcactttgggaggctgaggtgggcggatcacctgaggtcaggtgtttgagaccagcctgaccaacaaggtgaaaccccatctctactaaaaatacaaaaaaaattagctgggcgtggtggcagccacctgtaatcccagctactcgggaggctgaggcaggagaatcgcttgaacccgggaagcagaggttgcagtgagccaagatcgtgccactgcactccagcctgggcgacaagagcaagactgtctcaaataataataataggccgggtgtggtggctcacacctgtaatcccagcactttgggaggttgaggtgggtggatcactggagcccaggagtttgagacaagcctgggtgacacagtgagaccccatctaaattattattattattattatttgagacagagtcttgctccatcacccaggctggagtgcagtggcgcgatcttggctcactgcaagctccgcctcccgggttcacgccattctcctgcctcagcctcccaagtagctgggactacaggtgcccgccaccacgcccagctaattttttgtattttttagtagagacggggtttcaccatgttagtaaggatggtctggatctcctgaccttgtgatccgcctgccttggcctcccaaggtgctgggattacaggcgtgagccaccatgcccagcctgaattttttttcttaaagattaaaaaggcagagcctctctgctcctcccatttgacagacagccacatcttttcatgcagtgaaaaaggcatgtccccgagacaccgtggtgaaagtgaagacaggagtaaatggatttggccatattgggtgcctggtcaccagggcaccagagctgcttttaactctggcagaatggatgttgtcacctcaatgaccccttcattgacctcaactacatggtctacatgttccaatatgattctacccacggcaagttccgcggcaccatcaaagctgagaagtgggctgggtgtggtggctcatgcttgtaatctcagctacttaggaggttgaggtgggaggatcacttgagaccaggagttcaggaccagcctaggcaacatagggagatcctctctctcttaaaaaaaaaaaaaaagaaaagaaaagactgagaaagagaagggaagcttgtcatcaataggaaatgggaatctcatccccatcttctagaagccagatcccagcaaaatcaaattgggtgacgatgctggcactggttatgtcatggagtccaccagcagcatcttcacgaccatggggaaggctggggctcgcttaggatgggcagccaaagggatcaccatctctgccccctctgcccatgcccccatgtttgtgatggacatgaaccatgagagatacaaaaacctcatgatcgtcagcaatgcctcctgcaccaccaactgcttaccctccggccaaggtcatccgtgacaacgtttttttttggtttggtttggttttctttctttcttttttctttttttgttttaaatagggatggaggccaggtgcagtgactcatgcctgtaatcccaacactttgggaagctgcggttggaggatcacttgagcctaggagttcaagaccagcctggccaacatagcaagactctgtctctacaaaaagtttaaaaaaattatccaggcatggtggggtgtatctgtagtcccagctatttgagaggctgaggtgggagggttgcttgagcttgggaggttgaggctgcagtgagccgggtgacggagtaagaccctatttcataaataaataaatagagacgggggtctcactttgttgcccaggctggtcttaaactcctgggctcaagtgatcctcccactttggcttcccaaaatgctgagattacaggctgagccactgaccctggtcatccatgacatctttggcaacatggaggggctcatgaccacagcccctctgggaaactggcgtgacaaacatcatccctgcatctactggcacggccaaggctgtgggcaaattcctgcactgaacaggaagctcactggcacagccttccgagtccctgccaccaatgtgttggtggttgacccgacctgccatctggagaaacctgccaaatatgatgacctcaagaaggtggtgaaacaggcattgggggggccccctcaagggcatcccgggctacattgagaacaaggttatatcctccgcctttgtttttaaattatatttatttatttttttgatagggagtctcgttctgtctcccaggctggagtgcagtggcgcgatcttggctcactgcaacctccacctcctgggttcaagcaatcaattctcctgcctcagtctcccgagtagctgggattacaggcgcacaccgccacacccagctaattttttgtatttttagtagggatggggtttcaccatgttggccaggctggtctcaaaatcctgaactcaagtgatccacccgcctcagcctccgaaagtgctgggattacaggcctgagccaccgtgcctggccgtctcctctgacttttaacagcgacacccatccttccaccttctgtgctggggctagcattgcccttgatgacactttgtcaagttcatttcctggcatgacaatgtatttggcttcagcaaaaaggtggtggtccacactgtctccaaggagtaagaccctcagaccaggagccccagtgacagtatgagaggaagagagaggccctcagctgcttgggagtccctgctgcactcagccccccaccacactgaaaatctccccatacacagtttccatgccagaccccctgaagaacagggcctatcaataaagcagtaaggtcctctgtacttagaccaaaaacaaaaaaaaacaaaaaaaaaacaaaaaatgaaaattactcttgcctgtaatcccagcatttagggaggctcaggtgggaagattgcttgagcctaggagtttgagaccaacctgggcaatatggtgagactttgtctccaatatagatagatgatagacggatggatagaagatagacagattagacagagagagagagagaaaggagagagagagagagagagaaaagaggggaggggaggggaggggaggggaggggaggggaggggaggagaggagaggagaggagaggagaggagaggagaggagaggagaggagaggagaggagagagaaattaggcagaggagaggagagagaaattaggcagatgccttgggcagtgaagtccctggggatggtctactgttcccgcagcctgagcgcctttttcagacgtttttatctgtccactgctgcccctgcatggccacagcctgaactgcagcaccgaacgcagacccagtttcccttttggagaagaaattaatgctccttccagccccccacttgccactaggcctgtgcagggcgtggacagattctacagtggatccagccagagactgccccagagaaaattccaggggtgggatgagtgaggtatgctgggactggaatgtttgtaggataacatgatgagcagccggattcccaggaaattgcaaaccgtgtctgctctggtgagattctcagaggaggggatctataggcagttctgagtaggcactgggtaaaagcctggaaagaggaccctggcttggatggggctctgcctcactcgccatgagctccttggcgctatcagtcagcacagttcagctgcatgggtgtgaaggtgtcctggtgactggctacccccatgcctgcctcagtgcacgggaggtggaattatggatttggtggggctcgcacaggctaagggactgattttcagtctggagaatgggagggcaggatgagctgtggagggtcaggctggtggtttggagggtggcatgatgtaaatgtagctgttcactgttgtagtttgctgccaccagttcagtctggctaggttccaggtgggtcaataatctcaaatggggctgggctcagtggctcacacctgtaatcccagcacttcgggaggccgaggcgggtggatcacttgaggccaggagttcgagactagcctgcctaacatggtgaaacctcgtctataccaaaatataaaaaattagccaggtgtggtggcgggcgcctgtaagcccagctactcgggagactgaggcaggagaatgcttgaacccagggggtggaggttgcagtgagccaagatcgtgccactgcactccagcctgggcgacagagcgagattccaccaaaacaaacaaacaaacaaaatcccaaatcgggagaggtgaggtggggtctgtcatgccaaggagttggtttctttcttttttttttttttttttgagatggagtctcagtctgtcacccaggctggagtgcagtggcgctatctcggctcactgcaagctccgcctcccgggttcacgccattctcctgcctcagcctcccaagtagctgggactacaggtgcccgccaccacgcccggctaattttttgtatttttagtagagacgggatttcaccgtgttagccaggttgctctcgatctcctgacctcttgatccgcccgcctcggcctcccaaagtgctgggattacaggcgtgagccaccgcgcccggccaggagttggtctttatattacctaactcccacctctttcctcaatgatttgaacgtttgatcatttgaatgtttgaatgtttgatcctcgtgatcaaacattcccgttactctctagaccccatcatgctcccccaacccctccccacatcctctcagatatccaccagctctagcccccagagtaaaaacatccatcgtctccaccatcaagtgaaagcaaatggtgacttccttgcctcagccattgctgagccagttggatggcaaggaggaaaaccccacccaagccccacctaacccctgtcctccttttcatcccagccggtgcccactgattccatggttacctgacttatccactccagctcctggtccttctatcctgggtaccgctgaactgcttgggagtagcaggctgagaagttctggtgcccctcctgcagcaaggctgtcagcgggcacgggaggatgcggggaccggctggagtaagccatagccagggcaggaaggagccccacacagatctccctcagctgtgaactccacaacgacccacctcacagtcaacaacaccaatggacactcgttcctctaatcccgttattactaggcacccatttctctccacccaaggttttgttcaccatcctcaattatttattatttttttgagatggagtccaggctgaagtgcagtaacgcaatttcggctcactgtagcctctgcctcccgggttcaagcgattcccctgtctcagtctcccaagtagctgggattacaggcccccggcaccacgcccagctactttttgtatttttagtagagacggggtttccccatgtttgccaggctggtctcaaactcttgacttcaggtcatctgcctgcttcggcctcccaaagtgctgggattacagacgtgagccaccacgcccagccggtacccccaattatttcagtattcatgatccgcaggaaggaatacatatgttttgttgttgttgttgttgttttgttttgtttcttttgtatttttagtagagatgggattttgccatgttggccaggctggtctcaaactcctgacctcaggtgatcctcctgcctcggcctcccaaagtgctgggattacagttgtaagccaccatgccaggccatgaatacatatgttttattgagttctttttttttttttttttttttttttgagatagggtctcactctgttgcccaggctagactgcagtggcaccatctgctcactgtgacctcgacctctcaagctcaagcgatcctcctacctcagcctccccagtagctgggactataggcgtgcaccaccatacctagctaatttttgtattttttgtagagacagggtttggccatgttgcccaggcttcttctttttcaatgaatgtatttacagctataaatttttccttctagcactgctttctctgcattccatacattttgatatgttggattttcatatttgtctcaaggttgtttttattttttattttatttatttttatttttatttttttgagacaatttccctcttgttgcccagtctggaatgtaatggcatagtcttcgctcactgcaacctccgcctcctgggttcaagcgattctcctgcctcagcctcccgagtagctgggattacaggtgcccgccaccacaccgggctaatttttgtatcttttgtagagatggggtttcaccatgttggccacgctggtctcaaactcctgacctcaggtatcagcctcccaaagtgctgggattacaggcatgagccaatgtgccccgcctcaatagcctcaagcaatcttgtcacttcaatcccctaaactgggactacagggaggcaccactgtgtctggcttggatcatattttaaacatctattctgcctatctctgttttttgattggaaagtttaacccatttcaatttaaaggaattcctgaggtggaaggcccaacttcagccattttaccatttgtgttctgtgtgtcttggagcttttttgttctttatttcttccattactgccttcttttctgtttacttgactttttgtaatgagactttttgattctcttatttcctttcgtgtattttctatagatattttctttatggttactatggggattacatttgacattctaagttataataatataactttattttattttattttgagacagagccttatctgtcacccaggctggagtgcagtggtgtgatcatggctcactgcagcatcaacctcctgggctcaagcaatcctctcacctcagcctcccgagtatgtgggactataggtaagggccaccatccctggctaatttttaaaaaaaatttttgtacagacaaggtcttactatgttgcctgagctcttgaactgctgagctcgagtgatcctctcgcctcagcctcccaaagtgctgggattacagacatgggccactgttcccagcaaaggtttaaatgatacctatttaacttcaatagcatagaaatattctattctattaattgagaactagtcttgctatgttgcccaagcttagatttgaactcctgggctcaagtaatcctcctgtttcagcctcccaagtagctgagactacatgcatgtgccattatgcctggttatggtataaacatactctatttccttttttcttttctttttttttttttttttttttgagacggagtttcgctcttgttgctcaggctggagtgcagtggtgtgatctcggctcaccgcaacctctgcctcctgggttcaagcgattctcctgcctcagcctcctgagtagctgggattacaggtgtgcgccattacgcctggctaattttgtatttttagtagagacagggtttctccatgttggtcaggctggtctcaaactcccgacctcaggcaatccgcctacctcggcctcccaaagtgctggaattacaggcgtgagccaccacgcctggcccagatactctatttttatagtttcctcttcttttatgttattttttaaaatttttatttacttatttatttgaggtaggatctcactctgtgacctaatctggagtgcagtggcgtgatcacggcttactgtagcctggaccttccgggctcaaacaatccttccacctcagcctcccaagtagttaggaccataggtgcccaccaccatgactggctaatttgttaatttttccatagagataaggtctcactatgttgcccaggctggtcttgaactcctgagctcaagcgatcctcttgcctggactcccaaagtgctaggattactggcgtgagccaccgcccccggctcttttatgttgttaatgtcacaaatcacatctttatatattgagtgcccaatatcatagaaatataattatttttattacttttcttgagaaagcatctcgctcttgttgcccaggctggagtgcagtggcgtgatctcagctcactgcaacctccacctcccgagttcgagcgattctcctgcctcagcctcccaagtagctgggattacaggcatgtaccaccatgcacagctaattttgtatttttagtagagacagggtttctccatgttggtcaggctggtccggaactcccaacctcaggtgacctgcctgcctcggcctcccaaagtgctgggattacaggcatgagccaccatccccggctttctttttttctttttgagacagagtctcgctctgtcacccaggctggagtgcagtggtgcgatctcagctcactgcaacctccgtctcccaggatcaagcaattctcctgcctcagcctcctgagtagctgggattacaggcatgctccaccacatgcggctaattttagtatttttagtagagatggggtttcaccatattggccaggctggtcttgaactcctgacctcaaatgatccacacacctcggcctcccaaagtgctgggattataagcatgaggcaccgtgcctggccggtcttttcttaattctttttttctgggcctctgtggtaactgtaatttcctctgtggctgcctttgaatgacctaattgtcaatgtctgggtcccaagagaaaaataaaataacaaaagtgcaaaaagaaaataaaatttcggctgagcgaggtagctcttgcctataatcccagcactttgaggggctgaggtgcgaaaatcgcttgagttcaggagtcctagaccagcctgggcaacatagcgagacattgtctctactaaacctaaaaaaatattatccgcgtatggtggcacttgcctgtggtcccagttactcgggaggctgaggtggggggattgcttgatcccaggagatcgatgctgcagtgagctataatagcaccactgcacgctatcctgggtgacagagcaagaccttgtcttaaaaaaaaaaaaaaaaaagaaaaaaatcaataccttccaaattcattatgcgaaggggaaaattaagcacttaagtcctagaaactgagtcttataatacagcttctctgatgcatgactgatgcttccttacctttgttttgagactgtagccatcagactccttgttcttcattcaaacctatactaaatgatgtaggatatgtatacccttgcgactgttaccgctttacaatagaatgttaagcaacccccatagagtgtaatcaacagtagtcaatcacatctgtttttttttttattttaatttttttttttattttgagacagagtcttgctctgtcacccaggctggagtgcagtggcatgatcttggctcactgcaacatctacttcctggattcaagccattctcgtgcctcagcctcctgagtagctgggattacaggcatgtgtcactatgcccagctactttttgtatttttaatagagacagattttcactatgttggccaggttggtcttgaacccctgacgtcaggtgatccacctacctaggtcttccaaagtgttgggattacaggtgtgatccacggcacccagcctcaaatcttatgtctgtatattaacatctgtatggaaatgtatttctgttcagcacctctgtttttgcctatatagacaattttcacttttccccacactgggatcattgatcactattcttcggtgtcagcatgtccctgatggccacccttgtactctgtgtttgaataaactcttttttttttttttttttgagacaaggtctctgtcatctaggctggagtgcagtggtgccatcatagcttactgcaacctcgatttcctgagatcaagtgatcctcccgtcctagccccccgagtagctgggactacaggtgcaccctatcatgcccagcttattaaaaacaatatatttttttgagagacagggtctcactatatggtccaggcgggtctcaaactcctgtgctcaagccgtcctccagccttgacctcccaaaatgctgggattatagatatgagccactgtgcctggccttgaataaactattttaactggatcttgagcctttcgattattttaggttgacaaagggaaaaaaataaaaggcatcagctctttatatcccccaccacgcctggctaattttttgtagttttagtagagacggggcttcaccgtgttagccaggatggtctcaatctcctgacctcctgatccgcctgcctcggcctcccaaagtgctgggattacaggcatgagtcactgcacccggccaatttttgtatttttttgtagagatggggtgggagggtttactatgtggcccagactggtttcaaactgctaggctcaagcaatcctcccgtcttggcctcccaaagtgctaggattggaggcatgagccactgtgctcagcccctggctaattttcatattttttaaatggggttaggggttggtctcactatgttgcccaggctggtttcaaactcccgggctcaactgatcctcctgccttgacctcctaaactgctgggattacaggcatgagccaccatgcctggccatagattctttatgatttttattctgccatcttccctgaatcctccaacctgccttttttttttttttcaggcaaagtcttgctctgtcgcccaggctgatgtgcagtggcacgatctcagctcactgcaacctccacctcccaggttcaataattttttgtatttttagtagagacggggtttcactatattggccaggctggtctcaaactcctgacctcgttatcctcctgcctcagcctcccaaagtgctgggattacaggcatgagccactgtgcccagcttaacctgcctttttttttgagacagtttctctcttgttgaccaggctaaagtgcaatggtgtgatcttggctcaccgcaacctccacctccccgattcaagcgattctcctgcctcagcctcccgagtagctgggattacaggcatgtgccaccaggcccggctaattttgtatttttatttatttatttattttattttatttatttatttatttttgagacggaatctcgctctctctcccagtctggagcgcagtggcgccatctcggctcactacaagttccgcctcccaggttcacgccattctcctgcctcagcctcccgagtagctgggactacaggcgcccactgccacgcccggctaattttttgtatttttagtagagatggggtttcaccgtgttagccaggatggtctcgatctccagacctcgtgatctgcccgcctcggcctcccaaagtgctgggattacaggcatgagccacggcgcctggcctaattttgtatttttagtagagatggggtttctccatgttccgaactcccgacctcaggtgatccgcctgcctcggcctcccaaagtgctagattacaggcgtgctccatcgcacccagcccaacctgccttttaatactaatacattactttgggtctcatcccacatcacttcatcagagagcatccttcctctcacctcagttatttctacttttttttccacgtatagatgttttttcagggaccggagggtatgggaggaagccttggcacgcctcatcccaaatgcccgtttcccggaacatcaggcccttcctcctcttcctgtcctccctggcctagcctgggctccctcccgttctgaggcaaggcgattgctccatgtcacagtgagtgtggagttccctgcacatactggtgaccttgtgtccggaaggaattagaaggaagagctcatggagtgccagaagaagacagtgcctactctggcaagctagaagcaagctctgcattaaatgcaaatattggccgggcacggtggctcacatttgtaatcccagcacctggggaggcctaggcaggaggatcacttgagcccaggaattcacgaccagcctggtcaacatagtgagaccccatctaacccaccccacccccgtcacacacacagcaccaacaacaaaataaaattagcagagtgtggtggggcgtgactttggtcccagctactagggaggctgaggcaggaggatcgtttgagcccgggagattggggctggagtgagccgagatcatgccactgcagtccagcctgggtgacagagcaagaccctgaaagaaaaaaaagaaaggagggagggagggaggatggaaggaaggaaggaaggaaggaaggaaggaaggaaggaaggaaggaaaccaaaacaaggccacgcgtggtggctcacgcctgtaatcccagcactttgggaggctgaggtgggcgtatcacttgaggtcaggagttagagaccagcctcggtaacatggcgaaaccccgtctctacgaaaaatacaaaaattagccaggcgtggtggcgggtgcctgtaattcagctactcgggaggctgaggcacgagaatcgcttgaacccgggaggcagagattgcagtgagctgagatcgcgccactgcactccagcctgggcgacaaaagcgaaactccgtctcaaaaaaaaaaaaaaaaaaaaaccaaaacaaaccctcaaatatccctcgggctgggtgcagggaggaaactcggcctgagaggcgcagtggctagaaccagtcaacactgctacgcacagccacgtttccatggcttcctacgtcactcaggccttagggggcggggtatgtcaccctatccaatcaggggcgctggggcggggccctgccaactgtccattcagatgggcccgggagaggagggcagggcctgcgcctccctacggagcctttgtttctggcgaccgtccccacccgggctcgcgtctccgtttctccgagaggcccaaggtgtctccgccgcagcctctgtcgcgccgtgacctgtacaggtcgcgggagtcgtagggaggacgccgggacacctggaagccgagaaatggtgcgtgtgaggggtcaggcgtccccagacctgggggaggggctggttggaaccggccggaaccggctgtggagggacctaggcctccctgcggcgactccggggtctgggacccgagttccctcggccgcaaggtggggctgggccaggagctgggaccccggtcgtcctgtcccgtccctgcgcgacgcctgcggccccgcagccccgcgtctccccacatggtgcgggggccgcgggagggtcatgggggtatccctcctcggatgtggttcgtgttgcaggagctgcggtctgtggccgccccccacagtcccgcctttctcccgttaaaaatttagagtttatttgagcaaacagcggctcatcgatggagaagctcccggtcgtggtttgtggcttggggatccgttggagggaatggaaggaaaggctgtaaggtgcaggaggaagcgaaccaaattcagtacttggttggtgacagttatgcagtcgccttatttgctctatctaggtggacattttctgcttatgtagtcagaggtggattggtggttgtggtttattaaccctaaattttatttccttataaactggtaatttataagaatttcatttgaggctggagcgcggtggctcacgcctgtaatcgcagcgcttttggaggccaagacaggaggatcgcttgggcccaggagttgaagatcagcctcgcaatatagcgagaccccatctctgttaattttttttaaatgaacatattcagactgagaccaaaaaactactacaaatttttaaaatataaaatcaaataaaagaatttcattcgacttagatttctgtttccttgggtaggaaaccaggacaccatagccacagccctctaattgtctccaaattaattattttaacactccccagggggacagggtcccaaatccttgaccttgttcccctagcctgactcctctggcgcttgcaaataattcttgataccacttctttcaccatattcccaaaaggtaactccagtcacgacattatcaactctttgtcctttattgcacatttcaaactaattaatttgtattattttttcaaggagcaatcgattggtcttttaaaaatatttgctttctgtttctgaacatttcacaggagaggaaagcagagaatacatgtatgagaccctgctgtgaaaaaacctttgtgcctcttctccttttctctctcctaggcacagggatgttctcagaatgtcttttggttggcctggtgccatggctcatgtctgtaatcccaacactttgggaggccaaggcgggaggatcacctgaggccaggagtttgagaccagcctgagcaacatagtgagacccggaccctaaaataaaaaaaacaaaaaacagtgtctttgggttggggttcccctttggaaactttaaactgtgatatgtcttcagagcatcctcctttcctggtcctgggcttcagggctgtttgggctgacacaggatgcccacagcagccagatctgttgaagggtctggtatcagcctgctcccactggacagcctgaagtacggggtggggcctcttagtggaggagctgggtgtcctggggtcggaggaatctcttgatatcccctccctctcaaagctcacccctgggacactcagcttttcttcccctaattccagatcccattccttgggggacacattggtgtccagccaaatggatgatggtattgaggggaaaaacagatatgattcttgccctctggattcttttagactggtgaagtgagaaaacttatcccaaggacaggaaaacccatcccactgaggtgatgcaagaacttgaaaagcaaaatgtacttcaggcagatggaggcaaaatgcagtgtctcttggaagggtggtcactgagcccttcagtgagcaggttagggggtggacgatatcccaggtgatagaatgacctgacttaggccgggcgcggtggctcacacctgtaatcccagcactttgggaagctgaggtgggcggatcacttgaggccatgagttcgagaccagcccggccaacatggcgaaaccctgtctctactaaaaaatacaaaaattagctgggtgtggtggcaggtgcctctaatctcagctactggggaggctgaggcatgagaatcgctttaacgtgggaggcaaaggttgcagtgaaccgagatcacaccactgcaccccagcctgggtgacagagcgagactctgtctcaaaaaaaaagatgtgaaacttgagtcagacgtacctctgttccaggttagcgcagccccttcctgggtttgtcccctgcaaaagatttgttcacttattgcagtttcagtttttttcttttttaagtaactataaatgtatttcatcagtagaccttgaaatataagacagttttgcaaagaggcaagaaggaagtggatttcagaaaacattaaatatctagtcttatgtttgttaaaaattattacttatggctgggcgcgatggctcacgcatgtaatcccagcactttgggaggctgaggcaggcagatcacgaggtcaggagatcgagaccatcctggctaacacagtgaaaccctgtctctactaaaaacacaaaaaattagctgggcatggtggcgggtgcctgtagtgccagctacttgggaggctgaggcaggagaatggcatgaacctgggaggcggagcttgcagtgatccatgattgcgccactgcactgcagcctgggcaacagagcaagactccatctcaaaaaaaaaattattatttttttctttcccaaagcaagtgtagtaagtttctcaagtatgttgtttttttttgtgggggtggggtgtggtgatttaaaatggaattccagggcttagtgttgggaatactaaggaaaagagagagagaaaactctcttctatcatgactgcagaaaatgaatacatttccacaagtaagtgtagcaaataaattggtgaattacagagattcaccaaaacatcaattcctctgctttgcagggtggcaaacttgtgacagtggataactgttctcttcctgttatctagacatcagagtttaatgcgaagtcctagtaggacaggacttggtaactcctagaagtgttccaatatgatttagtacatgatttgttaccatagaaagaataaataacatgtttattgtctgaagaggatggatacttttacttttcctgttaaggtatgaaatataagtgccttacaatttccttccttgctataaacagtgaatttgagtgattttactggaatcttcaaaccctgggtattttctcattgaaaattaaatgcataaccttgactgggaaacagagacagcagactagtgacttgaaactaagaccaatcttgagccttcaaagagaggacattacaggcccagtggttcttgctgaggagcctcccctgcagtgtcccagctgctcacaactgactttgggtggagccctttatagtgagagaagctcagagccctggaaagctggggattcataggcagaggtggttgaggtgatgcctttctgagaatgtacttgctattatcttgggtctgtttgtagacgtttctaatgaaacaaatctggatttaggtaaggagtgatttattttatttttatttatttattttttttgtgtgtgacagggtctcactctgtctcctaggctggagtgcagtggtgcgatcatagctcactgtagccttgatctcctgggctcaaggaattctctcacatcagcctcccaagtacctaggactaaaggcatgtgccatgatgcctggcttatatttttaaaaaagtttttttaagagagacaggacgttgttatgttgcccagactggtctctaactcctggcctcgagcaatcctcccaccgtagcctccccaaattccaggattatgggggtggggcggggagcaccaccacaccagacaggaatgactattctaaaggataatcgaaaggggagaaggcaccaagtataaaatcttcaagcatctcaggctgggcgtggtggctcacgtctgtaatccatgcactttgggaggccgaggtgggtggatcacaatgttaggagtttgagaccagcctgaccaacatagtgaaaccccatctctactaaaaatacaaaaattagccgggcatggtggtgcgtgcctgtaatcccaactactcgggaggctgaggcaggagaatcgcttgaactcaggaggcagaggttgcagtgagccgagatcgcgccactgcactccagcctgggcgacagagtgagactctgtctcaaaaaaaaaaaaaaaaaaaaaaaaatctgcaagcatctcagagtttatgcagaaaaggattttcttttgtagggaggagcaaatgatgagaaagaaggtgggaggtggaaggcaggatgcagggtgcaaaatcccacctagatcctgaaggcagtctcttcttaggagggtcatcagaggggttgtatataggctcaggctgggggtgggtcaaagttcaggggctggaggaagaagagaaacttaaccaaagttttgttaacaggtactttgttctgactgatcactgaagacagagctgttcagctaatcaattgtgaggaaaataaagggaatttctagtctgtgtatggctttgtcataggtaaaaaagcagtgtcatctaagtcataatgagaagagtgtttctttgcgtaacctgctcctgcagaatacaaaagacgggggagtttctttaaccatagctatttccaggattacatacctgcccaatcttctgccgccattttcccttacatccatcccttccatttcgccatttctgatttatatgcagttgctgagaagtatgggtgatccctggggcttgtgactggcatctgcagtggggcactgttatggtaatgagccctgaacttgtggggtccccgttaactctgggtagtgtcagaattgatttgaatgcttaattggtgttggagaattggagatttggttgtgttcagcaaacaccacacatttggtgtcagaaatggtatatgaaaaaagacactagagatcagaaccttcacctggctctgggtaagtgttcgctggtgagaattgagaccctggaggagggagcatttccacactgtgaggagaggagagtgggttgtgtgaaacacctgtggactcactacccaggttcataaatgggcattgggcatttctggtatgtcctgatcttgtctcccgtctgtacccacaggtgaccaggtcctcatttttaaaaggtggttcttcatagttttaccatctatttatcattaggctgaattttgcttggctcttcctcttttgaatttttagtaagttattaccattaatattatgccaaaaagagtttttttttggtttctttgcctgtttgtttcacgcatgctggtttctgcatttagtttgggggttaggatttcagcaaatgaaagtttgggcaggggatggtggtggaatacaaacattcagtctgttaacaatcctaactgtattttgtacgacatcttggctattcttagccttttttttttttttttttgagatggagtctcactgtgtagcccaggctggagtgcagtggcgctcttggctcaccgcaacctctgcctccgggctcaagtgattctcccacctcagtctcccaacaagctaggactacaggtgcacagtaccacaccagctaatttttgtattttttttttttgtggaggcggggttttgccatgctgtctaagctggtcttgaactcctgggctcaagcagtccacccagctatgcctcccaaagtgttgggattataggtgtgagccactacgcccggccttatttttgtctgttttttgtggaagtgatatcatcctatatgttatattgtatgccatctgtctatttcacatagctgtgaatcttccatgaaatggtattttattcactattttacttaataaactttattttttagaccggttgtagtttgacagaaaaattgaacagataatacttagagtttccttattctcctccacaggtgattgttttcccctacttttctttttttttaagagacgaagtcttgctctgtcacccaggcttgagtgcagtggtgcgatcactgctcactgcaggctagacctccagggctcaagtgatcctgccgcctcagcctcccaagtagctgggaccacaggtgtgcaccaccacatctggctaattttttttttttttggtagatgggggtctcactatgttgtccaggctgatctctaactcctggctcaagtgattctcccatcctggcctcccaaagtacgtaaatatgatatcatatatatcatataattgatgaaccaatatatcatatatgatgatgatcagaattggtgagccaatatgttactaactaaagtttacacttcatcaaaattggtaatttttgttcttcaaaggacaccaagaacttgaaaagataattcaccaagtggaagaacgacttgcaaatcctgtgtctggtggggcatcttatccagaagcagcctgagtctcagtcccctccatcacactccatcagggtgggggctgaattggcagccaggactcccaggtatcctgtcccatcactgtaggaggcagtctacctcctggacctctctctgggcagttgtgcacctgcaatcctggatctcacccagatcatggggtgacaacagggagtggccatccagagagaaatctgagcctggtgttttgggtttgtgggtgggaggtactctcaggacaccctccccctccatggattcagacttgggtgggcccagcagaatggcatgtgtggttcccagctccttcatccccagtgggagggagcctgtcatcccctatgcatttcagataaatgaaccagggtctcaagtttacagccttgttccctgttaaagagagattgcactggaaacttgttaagaatgtcaaggaaaagtttattaagcacaattgcagtgagtcatgacagctgtaataggggagggagattgaattcagccttgaatgcagcaggaatattattggatttatagccaatgtacaaggtgagggagagaatggaacttggttgggtctcataggtgggagaaaaagaacttgattggatattaaggtaggaggagtctctataaactaccttagatggattcttgctgaaactgacttctgcaggccagtgccaagccctagtcaaaaagagggctctgaggagcttgactcaagtttggtgaaggaaggagtacttgagacctcttcagcctagtttttctttctttctttttttttttttttttttttgagatggagtcttgctctgtcacccaggctggagtgcagtggtgcgatcatggctcactgcaacctctgcctcccaggttcaagcaattctctgcctcagcctcccaagtagctggggttacaggtgcccaccaccaggcctgactaatttttttttgtatttttagtagagacaaggtttcaccatcttggccagggtggtcttgaactcctgacctcatgagccaccgtgcccagcctcttcagcctagtttttcccagggctctgtattagtctgttttcatgctgctaataaagacatacccaagactgggtaatttataaaggaaagagatttcattgacaggtcagtatggctggggaggcctcaggaaacttacaagtatggtggaagggaagcaaacatgtccttcttcacatggcagcagcaaggagaagtgcagactaaaggtgggggaaaggtgggggaagcccattataaaaccagatctcatgagaactcactattatgagaacaacatggaggtaaccaccccaatgattaaattatctcccacttgctctctcccatgacattcagggattatgggaactacaagaggagatttgggtggggacacagccaaaccatatcattccacccccagcccctcccaaatctcatatcctcacattttaaaacaatcatgccctcccaacagtcccccaaagtcttaaatcattccagcattaactcaaaagtacaagtccaaactcatctgagacaaggcaagtcccttctgcctatgagcctgtaaaatcaaaaacaagttagctacttcctagatacagtcattgggtaaatatacccattccaaatgggagaaattggccaaaacaaaggggctagaggccctatgcaagtcccaaatccagtagggcagtaattaaatcttaaagctttgacataatctccttggccaggcgcggtggctcacacctgtaatcccagcactttgggaggccgaggcaagcggatcatgaggtcaggagatcaagaccatcctggctaacatggtgaaaccctgtctgtattaaaaatacaaaaaattaggcatggtggcacgcgcctgtaatcccagctactcgggaggctgaggcaggagaattgcttgatcccagaaggcggaggttccagtgagccgagatcatgccactgcactccagtctgggtgatagagccagactctgtctcaaaaaaaaaaaagaaagaaaaaaagaatctcctttgactccacgtctcacatccaggtcatgctgatgcaagaggtgggctccctcaaccttgggcacctctgcccctgtggctttgcaaggtacagcccccactcctggctgctttcacagctggcactgagtgtctgtggcttttccaggtgcgtggtgcaaactgtcagtggattgaccattctggggttcttgaggacggatggtggccctctcctcacagctctactaggcagtgccacagtggggactctctgtgggggctccagttcccacatttctcttctgcgctgccctagcagaggttctccatgagggctccgcccctgtagcacacctctgcctggacacccaggcgtttttgtacatcttctgaaatctcggcagaggttcccaaacctcaattcttgtcttctgtgcacccacaggaccaacaccacatggcagctgctgtggcttggggcttgcaccctccgaagccatgacccgaattgtaccttgcctccttttagcaatggctggagtggctgggcacagggaaccaagtccctagggtgcatacagcaaggggccctggaccaggcccaggaaaccaaccattttttccttttaggattctaggcctgtgatgggaggggctgccatgaaggtctgtgatgtgtcctggagacattttctccattgtcttggtgattaacatttggcttctcgttactcacaaatttctgtagctggtttgaatttctccccagaaaatgggtttttcttttcttttctttttttttgagacagagtttcactcttgttgcccaggctggagtgcaatggcgcaatcttggctcactacaacctccacctcccaggatcaagcgattctcctgcctcagcctcccgagtagctgggattacaggcatgtgccaccacggccagctaattctatatatttagtagagaaggggtttctctatgttgctcaggctgctctcaaactcctgacctcaggttatccgcctgcctcagcctcccaaggtgctggattacaggcatgagccaccacgcctggctgggtttttttttctgttccattgtcaggctgcaatttttccaaactttaatgttctgtcacctcttgaatgctttgccgcttagcagtttcttccaccagataccgtaagtcatctctcacaagttcaaagttccacagatctctagggcaggggcaaaatgccgccagtctctttgctaaaacataacaagagtcacctttgcttcaagttaccaacaagtttctcgtctccatctgagaccacctcagcctggactttattgtccatatcactaccagcattttggtcagagctatccaaggagtctctaggaagttccagactttcccacatcttcctgtcttttgagccctccaagtctctaggacgttccaaactttcccacattctcctgtcttcttccgagtcctccaaactgttccaacccttgcctgttccccagttccaaagttgcttccacattttcaggtatctttacggcagagcaccccgctacccagtaccaatttactatattagtccattcttgcgctgtgaataaatacatacctgagactggataatttataaaggaaagaggtttaattgacatacagtttagcatggctgggaaggcctcaggaaacttaatcatgacggaaggaaaaagcaaacatgtccttcacatggtggcagcaaggagaagtgcagagcgaagagtggcaaaagccacttatgaaaccatcagatctcgtgagaactcactatcatgagaacagcatggagggaaatgcccccatgattaaattacctctcaccgggtccctcccacaacatgtggggattatgggaactacaatttaagatgagatttgggtgggggcacagccaaaccgtatcagggtcaaaataagttcctaagtttctggtttcccttgccacaatcccagatgtcaacttcccctctccagttgacattatcttcaattatgtctcccccatgctaggtttgaagcagctgtaatattttagttatttataattttccatagaataataaataacaattttaaagatttatctttttgtcagtgtatattttacatgagacaaaagctattcaagtggtgagtagccatttgaaattacattgtgtaaaatctgtgtccctaatgattcgtggtgttgagcatatttgtatgtgcttattggccatttgtatatatcctggagaaatgtccattcaagttctttgcccatttattatttatttatttttattttcacttttttttggaaagagctatgatgcccaggctggatttgaacgcctgggctcaagatccttctgccttaggttcctgaagctgggattacaggtgtgttccagcatgcccagccaattttgcccattttctaatcaatgtgttttttgctggtttattacaataacttattattattattattttttgagacagggtcttgctgcattacccaggctggagtgcagtggtgccatctcggctcactgcaatctccgccttctgagttcaagccatcctcctgcctcagcctcctgtgtagctgagactagagggcatgccaccatgctcagctaatatttgtattttttgtagagacagggttttgccatgttgtccaggctgatcttgaactcttgagctcaagctgtgtgcccacctcagcctcccaaaatgctgggattataggcgtgagccaccatgtccaacaatttattattattaattgtggctataaaaacaattaaaaatctaccatcttaagcatttttgtgtacagtttagtagtgttaactatactcaccttgttgtgcaaccaaactccagcaattgttcccattctctcaaatttattttttctttcttcaaggtggttaattttatcttcaagttagctgattcttattttgcttgcttgaatttgccattgaacacctatagagaaattttcattttagttgtgctttgcatcttccagatccgtacttcctgggtagtcttttaaaaaattttatatatatatatatatatatatatatatatatatatatatatatatgtattttttcccccccgagactgagtcttgccctgtcgcccagagctggagtgcaatggcatgatctcagctcactgcaacctccgcctcctgatttcaagcaattctcctgcctcagcctcccaggtagctgggattacaggcgcctgccaccatgcccggctaatgtttgtgtatttttagtagagacggggtttcaccatgttgaccaggctggcctctaactcctgaccttgtgatccgcccaccttggcctcccaaagtgctgagactgcaggcgtgagccaccgcgcctgtaattttttgttgatattattgcatgcatccttttcttagttttctttatttctttctccatggttgtctttactactttgagcatagttaaggcggttgcttaaagtcttcgtccagtgagcgcaataactggagattctcaaagatggtttatctcaattttttcccattgatgagccatatttttctgtcttctttatgattttgtttttgttgaaaagtgggatttgaattttttttttttttttttttttgagacggagtcttgctttgttgcccaggctggagtgcagtggcacaatctcagctcactgcaacctccgcctcccgggttcaagcaattcttttgaattcaagtcttttgaattcttctgagcccagaaaaggtcttttctggaaatgcgttctttcctggacatgaagggggcattctcaattccccagcatacctgggtttttctgagtatcctaatttctgaaagaaatttttctcctcagcttttcttcccaggctttagatggtctatcatatgtctcagccataatctgttggctcaggtagcttcagggtttttgtttactttatgacatttcaagcagttgctgcccttttttttcctcaaaaaataaaaataaaacagtcagatgtggtagtgtgcacctgcagtcccagttactatggaggctgaggtgggaggatcatctgagcctagggaggtcgaggttgcaataagtcgtgattacgccactgcactccagcctgggtgaccgagtaagaccctgtctaaaaacaacaacaaaaccttgtgtaactgctgctaattagagtatatattcagggcaacttgaatctgtactcctggtttgcagtcctcagctctggccccaatagactgtccatttgtattgattttgcctaagtttcttccttttagatcaacaaacttatggagcgcctttctgtttcatagatgggatgcttcttgattcgtgactcgctaataatagccaattagatcactgaactctttgttgaaatattttctttcttttttgagactgagtcttgctctgttggccaggctggagtgcagtggcgtgatttcagctcactgcaacctccacctcctgggttcaagcgattctcctgcctcagcctctggagtagctgggacttcaagcatgtgccaccacacctgactaatttttgtatttttagtagagacggggttttaccatgttggccaggctggtcttcaactcctgacctcaagtgatctgtccgccatggcctcccaaagtgctgggattacaggtgtgagctactgtgcccgaccccaaattcttgaccttcttgccaacacttgttctttggagtggttgatttttattgtgagtcataggagttttttatatgttcttgatactaacaccttgccagatatatgatttgctgatactttttacaattccctggttgccttttcccagtgttgatagtgtcttctgacacagaattatttatttagagacaaggtcttgctctgttgcctaggctggagtgcagtgatgatgtgatccgagctcaccccagtctcaacctcctgggctcaaggaatcctcttcccccagctgcctggcctacacaagtttttaattttgatgaaataaaatttgtcttttttttcttttgtgaaccatgttctggtgttttatccaagaaatcaatgccagacccaatagaaacttttgctgtgtgtttttgtttaaaaaggaaaattagaacagagttaaaagatccagttggcttttatttgcaattcatgaattggggtaccatcccattctataaaatagaataagagctcccgctgggcgtgacagaagggtgggttttgtaaggaacaagagaaacagaacaacaacaaagcagactggttaacatcaggttacttttattgaaagggtaaagcagaggggacgtccttattatgccagctgagattgactgggccctttcctattggttgctgtgagtctcctgttttggggaaaaactgggtatgtttgaggatctacctgcttctttaaaaattttagtttgattatgtggcacttagcatgagtgactccattttggtttggtctcatttgttggggactagtataggattttagtccaaaaaaatggcctgcataatttttactattttcttctaagagttgtttagttttagctgttacctttaggtctttgatccattttgatttcatttttgtatgtaagttaagggtccaactgcttttttttttttttttttttgagatggagtctcgctctgtcgcccaggctggagtgcagtggtgcgatctcagctcactgcaagctccacctcccgggttcacgccattctcttgcctcagcctcccgagtagctgggactacaggcgtccgccaccacgcccggctaattttttgtatttttcgtagagatggggtttcactgtgttagccaggatggtctcgatctcctgacctcgtgatccgcctgcctcggcctcccaaagtgctgggattacaggcatgagccaccgtgcccggcctgctttttttttttttttttttgagacagagtctcactgtcatctaggctggagtgcagtggggcaatctcagcttactgcaacctctgcgtgctgggttcaagcgattcttctgcctcagcctcccaagtttctgggactacaccagcccaccacgcccggctaatttttttgtatttttagtagagatggggtttcaccatgttgaccaggctggtctggaactcctgacctcaggtgatctgtctacctcggcctctcaaagtgctgagattacaggcatgaaccaccttgccgggcctcaactgcattttttcacatgtaggtatccagttttcccagaaccatttttttttttcaacttttatttttggttgagggagtacctgtgcaagtttgttacatgggtaaattgcgtgttactgggggttggtgtatttcatcacgcaggtagtgagcatagtatctgataggtttcttttccaccctcaccctcttccaaccctcccacttcaagtaggccgcggtgtctgttgttctcatctttgtactcatgtcatcaccattttttgaaaagtatttttttccaataatgaatctgggcacactcgccaaaagtcattttaccatttatgaatgtgtacctcccctcccctccctcccttcccccctcccctcccctcccctccctcccttcccccctcccctcccctccttcccccctcccctcccttccccccctcccctctcctttcctttcctttttcctttcctgacatagggtctcacttggtttcccagcatggtcttgacctcttgacctcaagccatcctctggtctttggcctcccaaagtgctgggattacaggcatgagctaccatccctggcctgaaggtggtatctgttaagagcaattccctgagcatatttcaagatgactactcttaccctcttcctgccataagcaggaagcaatttttctatgatcttcactgtgagaactgatgaagtttctggaggtagagctcacacatttctgggggccccctatgactggatcccctggatttttacctctttttttttaaaaaacagctaattaaaaaaaatatttagtagacaagaggtctcgctatgttttccaggtcagtcttgaactcctgagctcaagtgatcctcctgcctccatctcccaaagtgttgggattacaggcgtgagccaccgtgcccagccagatttttacacttagcctttagtaattcattagttgcaatttaggttttcctacccctgtactgcttcccacagagattttgctatgggagtctgttctagtaagttatgactcttttatcagttaggttggtgggatcctgtctaaaatccagtacccagatactgtcaaagctcaaactttgtgaacaagcatttctaaagatacacagtctcagggtggctaatgttaactcttttttctgcactctagttactagatttttttttttttttttttttttgagacggagtcttgccctgtcacccggtctggagtgcagtggtgcaatctcagctcactgcaagcttcgccttctgggttcacgccattcttctacctcagcctcctgagtagctgggactatgggcacccaccaccgtgcctggctaatttttgtatttttagtagagatggggtttcaccttgttagccaggatggtctcgatctcttgacctcgtgatccacccgcctcggcctcccaaagtgttgggattacaggcgtgagccaccgcgcccagccactacatgtttgttacaacaggtgctacaggcctaccttacagagagacattaggggtggcccaggcagtacatacttctcccaccagagaggcatgctcctattctgctgttgctagttcagttctagcagcagaattgctttgtggaaggaagtgagtctagacagagggtaagtttgatgactgtggaatcttgaaataaatgtttggaaagcatagcatcctgagaacttcttgggaataaagtctaggcccccagtgctgtctgtctcaaccttcctcctccacacatgggggatgtttcaggattcagtggcctttgaggatgtggctgtgaacttcaccctggaggagtgggctttgctggatccttcccagaagaatctctacagggatgtgatgcgggaaaccttcaggaacctggcttctgtaggtaagggtgacaatattcctttcctcagtgaattagagaacaagtgtttctagctccttaacactttggggaataaaccaggcatgggtacagggaattatgaatatagaatctaatacttttttcataattttatactaattcataatgacttttctgggtctaaattttaggaaaacaatgggaagaccagaacattgaagacccattcaaaattcccaggagaaatataaggtaatttgcactcacaaaagaaagttctgttccttgagagcatttcgtattgttaggaattttttttttttttttttttagatgaagtctcgctctgtcgccaggctggagtgcagtggcacaatcttggctcactgcaacctccgcctcccaggttcaagtgattctcctgcctcagcctcctgagtagctaggactacaggcacgtgccaccacgccgagctaattttttgtatttttagtagagacggggtttcaccatgttggccaggatggtcttgttctcttgacctcgtgatctgcctgcctcagcctcccaaagtgctgggattacaggcctgagccaccatgcccagcaggaatttttaaaagcaagcaaacaacatataagcccagcttcaaactgttttgtttttagaaaatcttctccaagccaggcatggtgactcacgcctgtaatcccagcactttgggaggctgaggtgggcagatcacgaggtcaggagatcgagaccatcctggctaacacggtgaaactccgtctctactaaaaatacaaaaaaaaagttagctgggtgtggtggtgggtgcctgtaatcccagctactcgggaggctgagacaggagaacggcgtgaattgggaggcagagcttgctttgagccaagatggcaccactgcactccagcctgggtgacagagtgagactctgtctcaaaaaagaaaaaaagaaaatcttctccaaaaacatagttaagtgtaacatagatgttcagtgtttgcaaaatagttcaattatagatagtattaagaaacttcatacgaatatctttttttttttttttttgagagggaatttcacaactcgttgcccaggctggagtgcaagggtgccatcttggctcactgcaacctccgcctcctggattcaagcgattctcctgcctgagcctcccgagtagctgggattacaggcgcctgccaccacacctggctaattttttgtatttttagtagagacagggtttcaccatgttggccaggctggtcttgaactcctgacctcaggtgatccacctgcctcagcctccgaaagtgctgggattacagatgtgagccaccacacctggccatgaatatcattttctttctttcttttttttttttttgagacagagtttcgctcttgttgcccaggctgaagtgcaatggcatgatcttggctcactgcacctctgcctcctgggttcaagcaattctcctgcctcagcctcccgagtagctgggattacacgcgtgctccactgcgcctggctaattttttttattttttatttttagtagagacagggtttctccacgttggtcaagctggtcttaaactcctgacctcaggtgatcctcctgtcttggccttccaaagtgccgggattacaggcataagctactgcgtctggccatgaatatcattttttgataataggtatggttgtgacctattgcagaccatttagtccactcatgttcaaacagttgagacaggcataaaacgtacactttccctggtaatgttaaacatgtgaatccaaggccaggcatggtggctcacgcctgtaatcccagcactttgggaggcagaggtgagaggatcccttgagccttggagttcagggttcacgcctgggcaacatagtaagattctgtctctgtatttaaaaacaagtatatgtaagtctaatacctattaataaatataaaatcatttataaacaaaacattaataatgtacttctcatttttctgacaagtcatattccagagagactctgtgaaagtaaagaaggtggtcaaggtgaagaaaccttcagccagattccagatggtattctgaacaagaaaactcctggagtaaaaccgtgtgaaagcagtgtgtgtggagaagttggcatgggtccttcatcacttaataggcacatcagagatcacactggacgtgaaccaaatgaatatcaggaatatggaaagaagtcatatacacgtaaccagtgtggacgagccttgagttatcatcgctcttttccagtacgtgaaaggactcatcctggaggaaagccctatgattgtaaggaatgtggagaaacctttatttctcttgtaagcattcgaagacacatgttaacgcataggggaggtgtaccttacaaatgtaaggtgtgtgggaaagcctttgattatcccagtttatttcgtatacatgaaagaagtcacactggagagaaaccttatgaatgcaagcaatgtgggaaagccttcagttgttccagttacattagaatacatgaaaggactcacactggagataaaccctatgaatgcaagcagtgtgggaaagctttcagttgttccaagtacattcgaatccatgaacgaactcacacaggagagaaaccctacgaatgtaaacagtgcggtaaagcctttaggtgcgccagttctgttcgaagtcacgagaggactcacaccggagagaaactttttgaatgtaaggaatgcgggaaggctttgacttgtcttgcaagtgttagaagacacatgataaagcacactggcaatggaccttataaatgtaaggtgtgtgggaaagcctttgatttccccagttcatttcgaatccatgaaaggacccacactggagagaaaccctatgattgtaagcaatgtgggaaagccttcagttgttccagttcgtttcgaaaacatgaaagaattcacactggagagaaaccctataaatgtacaaaatgtgggaaagccttcagtcgttccagttacttccgaatccatgaaagaactcacactggagagaaaccctatgaatgtaagcaatgtgggaaagccttcagtcgatccacttactttcgagtacatgaaaaaattcatactggagagaaaccctatgagaaccctaaccctaacgcttcagttgtcccagttctttcatgagcatgaaaggagtcacatagagaaaccccatgaaagtaagaaatttgggaaagccttcagtcctttctgtttctttcaactacgtgaaaggattcacagtggagaaagaccctgtaagataattggctttaaattacgagagacttgtgataggacagtaaaacctagagttggagttggatctctggattgtgttatgtcagtgttggtaggttaggaactagatttcccagaatccattccatttgtgattccatgatacaattcaccagtaacctatcttacatgagattcggaagtaagttaagaaggcattagtcatggtttggaagcaccatacagggagacagctgtgtgaatacaggctgtatggacacttgcttccatcccattttcctgcttctttgggttgccaatcaagagtatcctcaaaacgacttgactttaattttctcggaggtgataggcttccacacaggtctccagaagccctgcattgaatatccatccacactttggttttccttcagacattattatgtctgtactaggcaactaattcagactgtcctggttgggaatattctgtgatgctctgactcccctagtctgtagacggaattggcatacggtctaatttgtgtagtaagcacctttgttcatactagtagtgactgtattcttgattcagcctgatagctaccatgctgctgtcaaaaccaaccagaggggagcttgttcttctgctgtagtgtgcagtgactggcctcacccaggactttgatgtgagaatgagcactttcctctatcaggaaatttcaagtgtttcctgttattcgtagctcaatgtaatgcctcagttcattttcagttgtttgattatatgtgactaatatgtattttttattcaaacaagacttctgtacatgtttcttcaaaacagtttattaactgtcttcagtcttggattacatcaagtttataattttggcaaattgttaagacactgtgaagtcagcgttaaccatgtgcatacaacttaaggaattttttcctcctcatgtaaattttacttttcatgcttatatagtttcaacttttatcttcatagtaatttctcatctactcataataccaaaagttaagtcatgctgttttgtgtgctctcttgctaaagaccgcagagaccatacctgttgtcaaagagggtgtaataaactgtaataataatcatgaccacaaaccataaaggactgtgtgatgtatcagtaagagggtgctcagaagaatttcttacaggttttgtgcttgttataggttggttgatttctattttttttttttttttgatatagagtgttgctctgttgcccaggctggagtgcagtggtgcgatctcaactcactgcaacctccacctcccaggttcaagcaattctcctgcctcagcctccagagtagctgggatttcaggtgcacaccaccacactcggctaatttttgtacttttagtagtgaacggggtttcaccatgttggtcgggctggtctcaaactcctgacctcgtgatccacctgcctcggcctcccaaagtgctgggattacaggcatgagccaccgcacctggccaggttgattgatttatgttcagggaagcaagatgattctctgtatttgatgcagtgatgaggtaaacttaattctaaacttggtaatcataactgttcttatccagaagggaaaaggaatggagtggaggtaaacgtaattcatgagaaataccactcagtcatattagtgagaagaggggaatttgggtcatgtttatgatttggaacatgctgtctttcaccagttttaaagacatggttacagaatgccctttttttgtcttgattcatcatagccacctaggagcatggtctcacattgctggtgtctgacatgtttctctccaacagcgtaagacttggccttgcagtgagcggaggctggctcctggacttgtggacctgtttttgccttacttattctctgaacactgaagtatttcctgtgatgtactggacactgttttccattatgtacctcagttaaaatatgtaaatttacttcttagcaagctgtataatacttttaaaaagctcctttacgagtctaatgagactaatatatttatgcacattttctgaatgcaagcctaggaagggaacaaagtcagcatcaatattccaaccaagcctttcttgctccaataatatgcttttgtttttgtttttgtgtttttgtttttttagacaagagtttcactcttatcacccaggctggagtgcagtggtgcaatctcaactcactgcaacctctgcttcccggttcaagtgattgtcctgcctcagcctcctgagtagttgggattacaggtgcccaccatcacacccggctaatttttgtttcgtatttttagtacagacagggtttcaccatgttggccaggctgatctcaaactcctgacttcaggtgatctggccgcatcggcctcctaaagtgctggaatggattacaggtatgaaccactgttcctggcatatatgcttttgcttctaatttatcaataggcctcttatgccagcactacagagtaaaaagcaacatgcaaaagtcagctttttgtctgtacacttccacggaacaatccaatcacttcgttgaaggtgtccagcaagctcttgttgagaaaatccctgttgaaacttctcagtgtcaaaagcccaggtatcacaggatagagtagcaatcagcaaccaaaccatgactgtatgtggagatgacatattcagccccagataatgtattcacatgagtgaagggtggagtcattgcctgtcagattctacagtcatttggattagagagggcaatacagagttaggtgctactgaatccaaccactgagtccttctcccttgaaggcaacacccacagtgatagtgtgggccacagagtagaaaccccaccatcaacacgactccaaatgtgattttgcccgggatgcaggtgctgtgttgggatgcaggtgctgtgtggggatgaccagtgaaggtaggggacactggaagcacagggtgagggagatgaacaggacacagctgagcctgattattggccttgactgtgggagtatcttgatgcttcacaaacaccccagagaggacattgtagcacaggcccaaagagtgttcataaaccagagggccaccacttttggaaggcagtgatgtggctttctgtttgagtcctgatgctctgttgacagcatacactgttcttcatctgattagaaaagcaatgccggctgggcgcagtggctcacgcctctaatcccagcactttgggaggctgaggtgggcagatcacctgaggtcaggagtccgagaccagcctgacccgccttggacctattggactgaacaaacgggagcaaacacaggaataaaagacaagagacaaaagagtatatttggaagaaggggttggggggcaccttgcctctagtggacaagggccccgagctttacacagccctctgtatttattagacaaaagagcgagaaaagcggggggtgattgttgggtaattgtcagttggccatttggttcacaccaggcttgtgagactgcatcctttggacaataggcactaattttctcagtagataacttcaaggagcccagtgccagggagtgatgtccctcagcaaaccttttggtggcagggcagtgagtttgcccacatcctgcattcatgataaacagtttgctgtttgatcccatatagactcctgcggaatgctgagttggtcacgtcccacgggccttcggctccctgcatatccccctttttgtttatgtattaattgaaagaatgtaaggccaggctgagcagctctcattgtccgattggcggtccatctgattttacagaaaacatagcattagaactgtgttgtgactctgttaggccttctctctctctttgcacccaggctcagctggctcatggctcgtactggagggaccgggcccatggttggccaccctgggttcctcccgtctcccgttcatggtcgcacacaccttgagggcacccaaacggtgtgcccatctcctgtagaaacacaagcatgctctcttccccatgtcagtaaatccaccggacttttccattgtccttcttccagggatttccataacactttcagataaactttcctcttttcctctaacacttgtcaatgtctttctgctggagtcttaccatccggaccaggagccaaaaaaatttaaagtaaataaaaataataaaaagttctgattgaggtggtaagtggcctcctataccccctttttgttttttcaacatgtgttgtaatgtttgatgtgcctgctctataatgccttgtcctctaggattataaggaatttctattttatgggttatagcccaaagctgtaagaaattttgaaaagcatggccagtataagtgggtccattgttagtttttaattgtttaggtattcccatatgagcaaatgatgacagatgatgtcaccatacatgaccagctgtctcacctgtttggcatgtagcatgcagcatttgagaataagtgaaataaattaagcagttctgggtctagtgtacttttaactgtagcagtttctacgcgactggctacatttacaacataagctgaatcacagacaatgttgataggatctgaagctgtgagctgtaaaacctgaatgactgcagttagctctgaatgttgagctgaaaccccagaggtcgttattgttttgggacctttttggaatcacaaatactggagaattccaggggctaactgacttttctttttttttttgagacagtctcgctctgtcgcccacgctggagtaaagctctgtctcccgggttcatgccattctcctgcctcagcctcccaagtagctgggactacaggcgcctgcaaccatgcccagctattttttttgtatttttagtggagacggggtttcactgtgttagccaggatggtctcgatctcctgacctcgtgatcctcccgcttgggcctcccaaagtgctgggattacaggcgtgagccaccgcgcccggcctgctaactgacttttctatatgtcctgtgttcaattgctcttttaccaacagatgaagttcatctagcttcttttgtgataggggccattgatccacccacacaggtttgtcactgagccattctaatggtaaggcagtgggcaaaggagaaatatcaaatatcaatgacccccccgtcagaaatccttgtgtcctagcccttttctatctgtttttccagttactgatatcgggttaggatttcattgtagaaatttccctaaacctttttcactctgatatcccatgttcttcaacattttaaatcctggattatcaaagttttcatttgtaagtctcctatcccatgctgtaagtctcgaccccataaattgatggctatatttgcaacataaggctgcaaagtccagagcaagcttaaagttgtaaaagttctttaataaataaacagagtaacctgataggacgggcgcggtggcccacgcctgtaatcccagcactttgggaggccgaggcgagcggatcacgaggtcaggagatccagaccatcctggctaacacagcgaaaccccgtctctactaaaaatacaaaaaattagccgggcgcggtggcaggtgcctgtagtcccagctactcgggaggctgaggcaggagaatggcgtgaacccgggaggcggagcttgcagtgagtggagatcgcaccactgcactccagactgagcgacagagcgagcctccgtctcaaaaataaataaataaataaataaacagagtaaccttagctctctgagtgctagtaaactcagatcgagtgattgaattatgtggtctctactagcctgctgcttttccatgtttaccagacccatcagtaaaccgtgttaaagccttaggtatgggggagtgaaataccgcttcgaattgccttttacttaaacgaatcctgatgatatgagggtcataacttagcatttggactgcattaatcattaagattgctagctgaaatagtaataagtttaaaaagaaaatctgaacgcgtctctagaagcagagacttaaatgatatactttaaccatgtgcttaaaaccacgggcggaatagcttaaatcttgtaattgagtttttgggctgaccaagtttatggactttaatctggcaaacagtcttgaaaacagtgactcactggctggggaactcaatttaggactcttttagcaagtacaaatcacactatctgtaatcagtgggtaagacagtcattcatgcataagttttcactacacttacaacttttcttcactttctgagaaggacacaacatttttaccttctaatttgacaaatatcatttaattaggtttaaagttctcctttaaagggtaatgtgtggttttacatgcctagcttttaattactcattaatgaattcgtgggccctctgtaatctctttcccttcagaggttactgttttacttaaattgaatttggaaagctaccttaggggtaggagagagataacagtggccattattagaaaagaggtttttcaaattcttacattttacttaaatcttagcagagaatcatagtctgggacgtacgtaacacatgaacttttgctatgggctgctcacagagccagagggctgcggtgcaggtccttggcggcggccgcattgtacttgctcaggttttgcctgtgtctgcgccgctccctccctcctttgccgggggtggggcatgctgccagcctgggcggaccttgtgggcttggtcgctgccagcttttctgctgctgaaccttctattccgcccaccgcttgcttggtcgcgcggtttcggcttctaatgccttttttctttctttttttttgagacggagtttttgctcttgttgcccaggctggagtgcaatggcgcgatctcggctcaccgcaacctccgccttccaagttcaagcgattctcctgcctcagcctcccgagtagctgggattacaggcacttgccaccacgcccggctaattttgtatttttagtagagacagggtttctccatgttgctcaggctggtttcgaactcccgacctcaggtgatctgcccacctcaggtgatctgcccgcctcagcctcccaaagtgctgggattacaggcatgagccacctcgcccggcctttcttatctttttacagacatacacctgcttgccttgccgattttgcattactgagcaggttaagagctctccttctaatgctgcctgctcaagacagggactgatagctgtagcgtatcctctgtcctttttcctatctattggaggaggaggcttaggtaagacctctgtttcctctttgttatttttggcccagtgatattggggctgagggaagagaaggtgataaggcaggtgacgttttctcctccttcctctttttaggctcttctgtgtgtaaactgagccaggactgctctaattaaagcccataacgttaaagattttactgggacctgatgcctttgcacctgatgttgttcaagatttctccccactcattcccagagttctaagcctagcgttccttcttccgggaaccatgggcttatgtactccattattgaccacactagtttttaattccttcaacaacttaaattctagtggggtgtgttcatgaataaactgctgtggattatttgaatcgggccttacggaaataggaaaagtgcaaggtcctaagggctctccagctatggcagcagagcataaagttgtttgttttggggtctctatttctgctactgaaggaggcagtacagatgtttctgcgattggaggaggcggtataggccaatttttatcctccctcacctgttttttattttcagttggcgctgtgggtgggacaacagattctttcagatttttagactcagcctgctgtcccgcagaataataaggagctaatggcagaagtacagtatgaactaaactccaagtggagaaaactgaagaatcaactttaaaacctttttgatgagcctgttttaatccttctcctgctctgtcccaattttccgcatcaagagtgcctgcctgtggaaaccatgggtgatgcgtgaataaccatttgtggcttctgcaggaggttagttagtgcctgcgaattaacctgagctccagactgtctcaacagaaacttaagcaagtgcacataatgtttttcttcagtagacaaattcttccccttgttaacctgattcagaaaacttccccttcccagtacttctttaaagcactgcccccagtacttctttagggcactgaccttacatacgctatcggcagactcatcccggagtccccgtgcgtcttgtcaatttcagttcctctactccagcagaccttcttcgttcacgtcctcatagtcccgtgtttggactgccgcctgttcgagtgccacttatagagcttccgatcctgtcgctgtttggggtgccactgtgtaacctgcacggacctagggggactgaacaaaggggggcgaacgtgggaataaaagacaagagacaaaagagtatatttggaagaagggatgggggcagcaccttgcctctagtggacaagggccccgagctttacacagtcctccgtatttattaggccaaagggatagtgagaaaagagggagtgattgtcgggtaattgtcagttggccgtttggttctgtttggttcacagcaggcttgtgagactgcatcctttggacaataggcactaattttctcagtagataacttcaaggagcccggtgccagggagtgatgtccctcagcaaaccttttggtggcagggcagtgtgagtttgcccacaacctgcattcatgataaacagtttgctgtttgatcatatagactcctgcggaatgctgagtttgtcgtgtcccagcggcctttggctccctgcactgaccatcatggagaaaccccgcctctactaaaaatacaaaattagccaggtgtggttgcgcatacctgtaatccccgctacttgggaggctgagacaggagaatcgcttgaactctggaggtggaggttgcggtgagctgtgatcacgccattgcactccagcctgggcaaaagcgaaattctgtctccaaaaaaaaaaaaaaaaaaaaaaaaaaaaaagaaagaaagaaagaaaagaaaagaaaaaagaaaagcaacgctgcagtttgtaagtttcaacaatttagaattaaaagttattttggcaatctaggactcattcttcattctggctgcagacagagctatggatagggaatgtcacacatatttttaaggttatgttgtcttttatgttaaatggataacatttccactttgcgtttccatatgcaatggaaggccaaggcagcagaatcccttgaggccaagacttcaagaccagccgggcaatatagtcagactgtgtctctacaaaatattttttaaattgtttatataatttatgagattccagtgtcatgctgtcagctaatattaggaaattagtaggtgtgactatggtattctggttatgagaaatgcttcaatttattttattttattttttttttgagacggagtttcgctcttgttgcccaggctggagtgcagtggtgtgatctcagctcactgcaacctccgcctcctgggttcaaacgattctcctgccacagcctctcaagtagctgggattacaggcatgcgccaccaggcgcagctaatttttgtagttttagtagagacgggtttcaccgtgttggccaggatgatctccatctcttgacctcgtgatccgctcgcctcagcttcccaaagcgctgggattacaggcatgagccaccgcgcccagccttttttttcttttcttttctttttttttttttttttgagacggagtcttgctctgtcgcccaggctggagtgcagtgacgcgatatccgcttactgcaagctccgcctcccgggttcacgccattctcctgcctcagcatcccgagtagctgggactacaggcgcccgccaccacgcccggctaattttttgtatttttagtagagacggggtttcaccgtgttagccaggatggtctcgatctccagacctcgtgatctgcccccctcggcctcccaaagtgctgggattacttacatgcttgagccaccgcgcccggcttttttttttttaacagtctcgctctgtcacccaggctggagtgcagtggcgtgatttcggctcactgcaacctccgcctaccagattcaagcgattctcgtgcctcagtctcctgagtagctggaattataggcgtgtgccaccactcctgactaatttttgaatttttggtagagatgaggtttcaccatgttggccaggctggtctcaaattccagaccccatgtgatccgcctgctgtggcctcccaaagtgctgggattacaggtatgagccactgtgcccagcctcagaagtgcttccgttcttgagatgtgaaaattgcctttttagatatacgttaaaaaaaaaaaaatagagatggagccttagtatgttgaccaggccggtctggaactcctggcattaagcgatcatcccatctaggccccccatagtgctaggattacaggcatgagtaaccacacctgagatgttttatatttgcagtttttaataaagcaaagtcaaaaagaacaatttttaggataaatgaccttaggttgaaaacatttttattttcaaggaaaaatttgtgaattcattcctgtaccaaaaaattacatccagttcatttactacagcatgaaattttattgaaaagaacttaataatttcaaatgtgagcagaggttattttattctttcctttcacttactgtctgtctccctgagtttctttcttttttttttttttttttttgagacagagtttcactcttgttgcccaggttggagtacaatggcgtgatcttggctgactgcagtctctgcctcctgggttcaagcaattttcctgcctcagcctcccgagtagctgggattacaggcatgcaccaccatgcccggctaattttgtatttttagtagagacggggtttctccatattgaggctggtctcgaactcctgacctcaggtgatcctcccgcctcagcctcccaaagtgctgggattacaggcgtgagccatcacacctggctggatcttttacctaccatataggtaaaaccatggtcaaaagtgatacagaagcaggaggagcaagatggccaaatagaaccctccagtgattgttcccccaacaagaacaccaaattgaacagctatccacacaaaaagtaacttaggctgggcgcagtggctcacaccggtaatcccagcagtttgggaggctgaggcaggcaaatcacgaggtcaggagttcaagaccagcttggccaatatggtgaaacaccgtctctagtaaaaaatacaaaattagctgggcatggtggtgtgcacctgtaatcccagctactcaggaggctgaggcaggaggatcgcttgaacccgggaggtggaggttgcagtgagccgagatcgtgccactgcactccagcctgggtgacagagtgagactctgtatcaaaaaagagaagaagaaggagacggagaaggagaagaagaagaagaagaaaggagaagaaagaggagaagaagaagaagaaccaaacatcagctgtgcaatcacagtgcctggtcttatattaagtaaagaggcacggaagagggtgggaaagcagccttgaattgcctatgccaccactttcccatcctctcgcagaggccaaatggcatagagagtgaatctgtaagcttgggagagggagagcgcagtgattgtggcactttgcattggaactcagtgctgccctgtcattagcagaaagcaatatggggcagaactcagccagtgcccatggagggagcgtttagatcagccttagccagagttgaattgtccatcccaattgccagaacctgagttctggcaagccctgtcaccgtgggctaaaatgttctggtgtcctgaagaaacttgaaaggtagtcaggatcacaaggactgcaattcctgtgtaagtcttggtgttgggtgggcttggacccagcggacttggtgtgcacatgacctagtgagacactagctggggtggcaaagggaatacttgtgccaccactctcctgaccccaggcagtacagccagcagctcagggagagactacttccttctacttgagaagaaaggggagagtaaagaggacttatattgcaacttggatgcaagctcagcaacagtataatagggcaccaggcagaggcgtgaggcctctattccaggccctagctcctggacatttctagatacaccctgggccagaagggaacctactgccttgaaaagaaggacccagtcctggcagaattcatcaccttctgaacccctgggccctgagtgatcagcaggggtagccaggctgtacttgtatgggccttgggtaagacttagagctgtactggcttcaggtgtgacccagcacctttctacctgtggtggctatggggagagattcctgctgctggaggaaaggagagggaagaataggccaggcgcagtagctcatgcctgtaatcccagcactttcagaggctgagcccaggagttcaagacaacatgaaaaaatcccatctctacaaaaaatacaaaagattagccaggtgtggtggtatgcacctgtagtcccagctacttgggaggctgaggtgggagaatcacttgagcccaggaggtcagggatgcagtgagtcaagatggcaccactgcactccagcctgagagacagagcaaacccctgtctcagaaaaaaaaacaaaaaaaaatttctgtacagcaaaagaaacagtcacagtcaacaaagtgaagagacaacccacaaaatgggagaaaacatttgcaaacaatccatctgacaagggattaataaacaatatagagggagctcaaatacctcaataggaaaaaaagtctaataattcaaattaaaaatgggcaaaatatctgaatagacatttctcaaaaaaagacataaaaatgaaaatcagacatatgaaaaggtgctccacatcatcagagaagtgaaaagacaacagcaataccacatcatctcaccgcaattaaaatggcttttatcccaaagagaggtaataacaaatgatggcaaggatgtgaaaaaaagagacccttgtacactgttggtggaaatgtaaaatactaagccactgtggagaacagtttggaggctcctcaaaaatctggaattagaactaccctatgatccagcaatcacattgctaggtgtattccaaaaagaaaggaaatcagcatatcgaagagctttctgcactctgatgtttattgcagcactattcacaatagccaagattcagaagcagcctaaatgttcatcaaaagatgaatcgataaagaaaatgtgatacatattggctgggtacggtggcttacacctgtaatcccagcactttgggaggccgaggcaggcggatcacgaggtcaggagatcgagaccatcctggctaacatggtgaaaccccgtctctactgaacatacaaaaaaaattagccgggcgtggtggagggcacctgcagtcccagctactcaggaggctgaggcaggagaatggcgtgaacccaggagccggagcttgcagtaagccgagatcgcaccactgcactccagcctgggtgacagagtgagactccatctcaaaatagaaaagaaaagaaatgaaaagaaaatgtggtacatatacatagtggagtactattcagccatgaaaaagactgagatcctgtcatgtgcgacatcatggatggaactggaagtcattatgttaagtgaaataaaccaggcacggaaaggcaaacttcacatgctctcactaatttctgggagctaaaaataaaacaattgaactcatggagataaagagcagaagaatggttaccagaggctaggaagggtagtggaggaggcaggaaaataggggtggttaatgggtagaaaattatacttagaatgaataaaatctagtatttgatagcacacagggtgactacagtcaacaataatttattttacatttaaaaataaaagagtataattggattgtttgtaacacaaggaaacaataaatgcttgaggtgatgaatacctgatttatcctgatgtgatttgatatggcttggctgtgtccccacccaaatctcaacttgaattctgtcttccagaattcccaggtgttatgggagggacccagggggaggtaattgaatcatgggggctggtctttcccatgctattctcacaatagtgactaagtctcacaagatctgatggatttatctggggtttccgcttttgtttcctcctcattttctcttgccaccaccatgtaagaagtgccttttgcctcccaccatgattctgaggcctccccagccatgtggaactgtaagcccaattacacttctttttctttccagttttgggtatgtctttattagtagcttgcaaatggactaatacagtaaattggtaccagcagtgggttgttgctgaaaagatatccaaaaatgtggaagtgactttggaactgggtaacaggcagaggttggaacagtttggaaagctcagaagacagaagatgtgggaaagtttggaacctcctacagatgtgttgaatggctttgacaaaaatactgatagtgatatgaacaagaagatccaggctgaggtggtctcagatggagatgaggaacttgttgggaactggagcaaaggtgactcttattatgttttagcagagactggtggcattttgcccctgccctagagatttgtggaactttgaacttgagagagatgatttagggtatctggaggaagaaatttctaagcagaaaagcattcaagaggtgactaggtgacctgggtgctgttaaaagcgttcgttttaaaagggaaacagaacataaaactctggaaagtttgcagcctgatgatgcggtagaaaagaaaaacccatttttaaaggagaaattcaagctggctgcagaaatttgcctaagtagcaaggagccaaatgttaatccccaagaccatggggaaaatgtctccaggccacatcagacacgtttacacagcccttcccatcacaggcccggaggcccaggaggaaaaagtggtttcacgggccaggcccagggtccccgtgctgtgtgcaatgtagggacttggtgccctgtgtcccagccactccagccgtgactgaaaggggcgaacgtacagcttgggctgtggcttcaaagggttgaagccccaagccttggcagcttccgcatggtgttgagcctgcaggtacaaagaagtcatgaactgaggtttgggaacctccacctagatttcagaagatgtatggaaacacttggatgtccaggcaaaagtttactgcagaggtggggtgctcatggagaacctctgctagggcagtgcagaagggaaatgtggggtcagagccccccctacagagtctttactgggggcactgcctagtggagctgtgagaagagggctaccatcctccagaccccagaatggtcgatccactgacagcttgcactgtgcacctggaaaagctgcagacactcaacaccagcccgtgaaagcagctgggagggaggctgtacctgcaaagccacaggggcagagctgcccaagaccatgggaacccacctcttgcatcagtgtgacctggatgtgagacctggagtcaaaggagatcattttggagctttaaaatttgagtgccctgctggatttcagacttgcatgggccctgtaactcctttgttttggccaatttctcccctttggaatggctgtatttacccaatacctgtacccccattgtatctaggaagcaactagcttgcctttgattttacaggctcataggcgggagggacttgccttgtctcagatgagactttggactgtggactttgggattaatgctgaaatgtgttaagactttggggtactgttgggaaagcatgattgattttgaaatgtgaggacatgagatttggaggggtcaggggtagaatgatatggtttggctgtgtccacacccagatctcagcttgaattatatctcccagaattcccacatgttgtgggaggaatccagaggtagtaattgaatcatgggggatggtctttcccctgctgttctcatagtagtgagatgggtttatcagggatttctgcttttcctttttcctcattttctcttgccgctgccatgtaagaagtgtcttttgcctcccgccatgattctgaggcctccccagccatgtgaaactgtaagtccaattaaatatctttttctttttttcttttcttttcttttctttctttttttttttttttgagatgcagtcttgctctgtcacccaggctggagtgcagtggcatgatgtcagctcactgcaacctccgcctcccgggttcaagcaattcttctgcctcagcctcctgagtagctgggactataggcttgcaccaccatgcctggctaatttttgtatttttagtagagacggggtttcaccatcttggccaggctggtctcgaactcctgacctcatgatctgcccacctcagcctcccaaagcgttgggattacagacgtgagccaccgtgcccgaccaacatctttttcttcccagcctcaggtatgtctttatcagcagtgtgaaaacggactaatacatggttattacacattgtatgcctgtattaaaatatctcttgtacccaataaatatatacacctactatgtacccccccacacacaaaagatagcgttctttgtgtttttaaataggttttgccttaaagtctagtcaagtatgataatggcatatccactcttgttctcttttggttactatttgcgtggaatacctttttacctctgtattaggcttttcttgctttgccataaaaatacctgaggctggataattgataaagaaatgttttatcaactcatgtttctgcaagctttataggaagcatggtgctggcatctgctcaggttctggggaggcctcagagtttttacttttggtggagggtgaagccggagcaggcctctcacgtggcaaaataggaacgagagagagaggtagaggggaggtgccacacactttcaaaccaccagaccttgtgcgaactcagaagaagagctcacctatcactaaggggatggcccaagccattcattagagatctgtccccatgatccaaacacctcccaccaggccctgcttccaaccttggggattgcaattcaatgtgagattttgcggggatgtacatttaaagtatatcatcttccattccatttcgagtattttttgtcttggggtataaaatgagtgtcttggtcatgcattatggctcatgcctgtaatcccagcatttttatttttttaagacggagtctcggccgggcgtggtggctcaagcctgtaatcccagcactttgggaggccgaggcgggcggatcatgaggtcagaagttcaaggccggcctgaccaacatagtgaaaccctgtctctactaaaaatacaaaaaattagccgggtgtggtggtgtgcacctgtaatcccagctactcaggaggctgaggcaggagaatcgtgtgaacccgggatgcagaagttgcagtgagccgagattgtgacattgcactccagcctgggcgacagtgggagacactgtctcaaaaaaaaaaaaaaaaaaagatggagtctcactctcgccaggctggagtgcagtggcgtgatcttggctcacagcaacatccgcctcccaggttcaagtgattctcctgcctcagcctcctgagtagctgggattacaggctcgcgccaccacacccagctaatttttgtatttttagtagagatagggtttcaccatgttggtcaagatggcctcgatctcttgacctcgtgatccacacgcctcagcctcccaaagtgctgggattacaggcgtgagccaccgtgcccggccattcctagcatttctggagactgaggtgggaagactgctggaggccaagacttcaagttcagcgtgggcaacatggtgagatcttgtgttgagaagaaattttttaaaatttacacaattaatgacattttaatgtcattctatcaatcaatattaggtaagtattaggtgtgactgatattctggatatgtataaaattaactcaatatttgagatatgaaagctgccagggccaggcgtggtggctcacacctgcaatcccagcactttgggaggctgaggcaggcggatcacctgaggttaggagtttgagaccagcctggccaacatggtgaaatcccatctctactaaagatacaaaaaattagcccagcatggtagcatgcacctgtaatcccagctactggggaggctgaggcaggagaatcgcttgaacccaggaggtggaggttgcagtgagctgatatcgtgccactgcactccagcctgggcaacagagtgagactctgtctcaaaaaaaagaaaagaaaactgccttttatttttaattttttgtatttttatttttgagacagaatctcactctgtcacccaggctggaatgcagtggctcaatcactcatcactgcaaccccaactgattctgggctcaagtgattctcctgcctcaaccaccctagtagctgggactataggcacatgccactacgcctggctattatttaacttaattttttttggggggggatggagtcttgctctgtcacctaggctggagtgcagaggcgtgaacttggctcactgcaacctctgcctcctgggttcaagcaattctcctgcctcagcctcccaagtagctggaataacaggtggccaccaccatgcctggctaatttttgttttgtatttttagtagagatggagtttcaccatgttggccagactggtctcaaactcctgacttcaggtatccacccacctcaaccgcccaaagtgctgggattacaggcatgtgtcaccgcacctggccccgccaatgtttttaacttaaattttcatactcatgcacgtaactccacattctcctctattcacaggccctgataatctctattctactttatccctttatgaatttgactattctaggcacctcatataagtgaaagtatacaatatttattctggtgtctctggcttatttcacttagcataatgttttcaagttgcatgcatgtgttaacgtgtcagtaattcattgcttttttgtgcctgaaaatattctattgtagggataaatcaccctttgctcatccatttgtttgttgataaacatgtgggttttttccacagtaatattctgaataaggctgctatgaaattggtgtacatgtgtctctgtgtgttgtgcttttgattttttaggatatatacctaggagttgaatagtcacaggggaattctaaattcacctttttaaggaacagccatactgttttacacagtggctgcaatgttttacattctctacatcagtgcacaaggattcccgtttctccatgtcctcatccacacttattataatttttttttttttttttgagacggagtctcactctgtcgcccaggctggagtgcagtggcacaatcacagctcactgcagccttgacttccctggctcaagtgatcctcccacttgaggatcactgggaccataggtgctaagatgggactaccggtctgacccctgctttccatcgtggcctgaactagatttctagattttcaggtttactttgggatgcccttagccgagaggggaatccttcagtttgggagagaggggtgggctttgaattttatttttggtttacacatagaatagctggagtcggagtgtgatttgatatatgtagaaaatctgttaaggtcaagacccattggattaccttatggagaaaaggtttatgaatttgacaatttatgtcagtcagtaccttaaactgactccaggtgagtttcctgctggtgaaaatgaaggtctggggctgggcgcggtgtccttgtctctacaaaaataccaacattagccaggcatgatggcgggtgtctgtaatcccagctactctggaggctgaggcgggagaatcccttgaactcggaaggcggaggttgcagtgagcggagatcgcgctatcgcaccccagcctgggcgacagagcgagactctgtctcaaaaaaaaaaaaaaaaaaaaaaaaagagagaatatgatgaaggtctggaaggagagagtgttgccacactatgcagacaggacaggaaggcatgttgagagcctagagttaaatccttcagtgttcaggcctcatcaccaggttctgatcggttctggggctctgtttcagcagtcagaacctggctcccaagaatctgtttaacctcctgaatagggggtttcctgctgaacagtggctgaaaaactgcttctctgagctagttcatgtttttgcttttcttctcttttgattccttcatagaatattgctgccatataattccagtttttccacacatttaacaattttattccattgttgctgtgtttttattttcttggtgaaaacgagtagactccagggcgcggtagctcacgcctgtaatcccagcactttgggaggccgaggggggcggatcacgagtcaggagattgagaccatcctggccaacatggtgaaaccccgcctctactaaaaatacaaaaattagctgggggtggtggcgcgtgcctgtaatcccagctactcaggaggctgaggcacgagaatcgcttgaacccagaaggcggaggttgcagggagccgagatcgcgccactgcacttcagcctggcgacagagcgagactccgtcaaaaaataaaataaaaaataaaaaaataagactgagagatcaggtgggagaaaggcttggtcatgcagccagcagcttcatcccaaattcctgatccctggaggacatcagaccccctctcctactgcagtgtggcctgtgtggcctcggctccccttctgctccgaggccaggggatgtctccactggacagtgagtctgggattccctgcacacagttgtgaccccccagtcccggaggaagaagcaggaagggctcgcagactattggcaggaattcttcttaaatgcagatattccccgggaggggtcaggtcactgcccagggaggaaccccccctcccccgcccgccccatgccaagagctgtgtctgcaacctgttcatctggctccactcagcactgggagatcacttcttctgtcgctcagtgcctagggggcgggacctggagtactatccaatcagagccgctgggcggggccgtgagaactgtcaatcaggcgtccaggaggctggaggatgcgaggttgaaaaagcccgcggcgtcttctctgtcacccgcgctcggctccctgctcggtcgggctggaacctgtactggcagccggaggtgtaggtaggaaccggaatacctcggaagccgggaaatggtgagtgtccgaggccggggttcccgagacagggtacagctggttgtaaccgaccggaaccggctgtggcgggacccagacctcctcgctgttgtctctggggtctgaggacccgagtgccctggcccagctcggtcctcggtcctctcggcctcagggtggggctgggcctgcagccaggactccgggcgtcctgtccggtccccgcgcggcaactgcggcccaggttccggagtcctctctgggcagctccgcgtccgcagccccgcgtctccctagattgtgcggggacacgggagggtcatggggggaatcctcctcgggtgtggggttcatgtggaaggagcagcggtctgtggggtccccagttcctcctttgtctccaaggggctcgagtttttactgagatatccagatatatgcgaagcagggtctcaaatccgcaactgtgatccctggcctagcttctcctagggctgccagcaaatccctggatttccagatcccgctccgcgttttagagctggcctcctcttcagttcaccacaacaatgtcaactcttcgtcccccaggctttgtttcaaacatagccatatatatgtgtgtgtgtgtgtatatatatatatgtgtatatatatatatatgtgtatatatgtatatatgtgtgtgtatatatatatatatatatatatatatattttttttttttttttttttttttttttttttttgtgacagagtctcgctgtgtcgcccaggctggagtgcagtggcgcaatctcggctcactgaaacctccgcttcctgggttcaagcgattctcctgtctcagactcccgagtagctgggattacaggcgcccgccaccacgcgcggctaattcatgtatttttagtagagacgggttttcaccgtgttggccaggctggtctcaaactcctgacctcaggtgatccaccctcctcagccacccaaagtgctgggattacaggcatgagccactgcaaccgtcctcacacgtttttcatgtatatatgaattatatatatattaaatatatatatataatttttttttttttggtggagacggagcctcactctgttgcccaggctggagtgcagtggcacgatcttggctcactgcaacctctacctcgcgggtctcctgcctcagcctcccgagtagccgggactgcaggcgcgtgccaccatgcccggctaatttttgtattttagtagaaacggggtttcaccatgttggccaggctggtcttgaactcctgacctcaggtgatccgcccgtctaggcctcccaaagtgctgggattataggtgtgagccatggcgcctggccacacgcaatattttaataggcttttttttttttaagagggcaaaatatggctctttttgtaaagatttgttgtgtgtttgtgaacatttcacacttgaggaagcggagaaaaagcacctgacacttgctgtaaacaatctttatgcctctcctccttttatctgcccgaggcacggacaccttctgagaatgtctttgggttgaggtttatctttggaaactttacagggcgatgtgtcctcaactcaccctccatcttatcctggtcctgggtttcagaactgcctggggctgactgaagatgcccacagctaccatgtttcttggagggtgggtcactcctcccagaggacaacctgaggcgtggagttggggcttcccaggagaggagctaggtgccctggggtgggagaagtcccctggtattcccctccttaaaaagctaatcctgggccaggaacagtctctcacacctgtaatcccaccattttgggaagcctgtaatcccaccactttgggaagccgaggcgggtggaccccttgagtccaggagttcgagaccagcctaggcaacatggcgaaaccccgtctctactaaaaatacaaaaaaactagccgggtatggtggtgcgtgcctctagtcccagctcctggggaggctgaggtgggaggatcacctgagccagggaggtcaaagctgcagtcagctgcgatcgcaccactgcactccagcctgggcaactggagtgagacccagtctcaaaaaaaagctctaatcccctgggacactcagcttttcttccccaaatccagattccattccttggggacacttggctcatcagccagttggatggtggtattgaagggacaggacagaaatgattcctgttttctggatgctctcagcatagttaagggagaaaactattcctaaggacaggaaaacccaccccactgagatggtgcaagaacctgaaaagcaaaatgcactttaggaacacaggggacgcacaatgtgtcgtctcctgggagggtggtcactgagcacttcagtgagcaggatggggatgggggatgcccctggtgacaggaggatacgatgtgacacttgagttagacttgtctgtgttctaggtccttactgtctctctctgggcttgtcaccttgcaaagattggttcacctatttcagctgcagattaaatctctacttttggaagcttttcaactatcttttggttatcaatttctagtttaatatgatttgattgcatactttatagcatttctgttcaatttgttaaggcatattttatgcttccagtgtagtttactgtggtgaatatttcatgtgaacttgagaggaatgtgtattctgctggtgttgaatgaaggattctataaatacatattaattaaatgcagttgattaattgatacagtttggctgtgtccccacccaaatctcatgttgaattgtagttcccataatcctcacctgttgtggaagggacctggtggagataattgaatcatgggggtgtttttccccatcctgttctggtgatagtgagttagttctcaagagatctgatggttttataaggggcttccttcttcgctgggcactcgttcttctccttcctgccaccatgtgaagaaggacgtgtttgctttcccttccgccatgattgtaagtttcctgaagcatgtctttattagctgaatgagaacggactaatacattattgatgctgttgagtttagctatatcattagtgatttttttgttgtattgacctattaattatggatagaggtgaactgttggcttccaactataattttggatttgtatattttgtcttatagttttatgtttttgtcttgtatcttgatgttatattttatgggcatacatataagtaataaagattattataccttatgtcttttttttttgagacagggtccccatctgtctcccaggctggagtgcagtggcacaatcacagctcactgcagctttgacctcccagtgcccaggctcaagtgatccttcagcctcagcctcctgagtagctggtactacaggcatgtaccacgatgcctagctaatttttgtttttttttgttttttttttgtagagacaaggcttcgccatgttgcccaggctggcctcgagctcctggactcaagcattctgctcaccttggcctcccaaagtgctgggattacaggtgtgagtcattgcgcctggtcctattatgtcttcttgcaggattgacctcttcactgttacaaaatctcttttacaaggcaatgatggtccggcgtggtggctcacacctgaaatcccagcactttgggaggccaaggcaggtggatcacctgaggtcaggagttcgagaccagcctggccaacacggcgaaaccctgtctctactaaaaatacagaaaatagccgggtgtggtggcagtcacctgtaatcccagctactcgggaggctcaggcaggagaatcacttgaacctgggaggtggaggttgcagtgagccgagattgcaccattgcactccagcctgggcaacagaatgagactctgtctcaaaaaaaaaaaaaaaaagcaagcccaaggcaattatgaggaaaattccttgccattttccttgatctaaaatgtggtttgtctgagttttataaaactattgcacatttcttttgattagtgttagaatggcttatctttcttcatacctttttatttaatctattcacttctttttgtttgaaatgattttcttgtacacattactgaggcttgtttaatctactatgtcaatctgtgtctcttttttgtgtatataagtaacagacatttaaagtggtaattgatataattgtattaatatgtatatatgtaattgttctctgtttgttgtacttgttttcttctttctttctttcttttttttttttagacggagtttcattcttgttgcccaggctggagtgcaatggcgcgatctcagctcaccacaacctctgcctcccacattcaagcgattctcctgcctcagcctcccgagtagctgggattacaggcatgtgccaccatgcccagctaattttgtattttttagtagagacggggtttctccatgttggtcaggctggtcacaaactcccgaccttaggtgatctgtccacctcgaccttccaaagtgctgggattacaggcatgagacactgctcccggcctcgttttctatttttaaaactttctctttttctaccttctgtagtttttgcttgtttgtttgtttttttgagatggagtctcgctctgttgcccagcctggagtgtagtggcgtgatctcatctcactgcaaccttcacctcctcctgggttcaaatgattctcgtgcctcagtctcccgagtagctggtattacaggcgtgcgccaccatgcccggctaattttaataattttagtagagacagggtttcgccatgttggccacgctggtcttgaactcttgacctcaagtgatccatctgcctcggcctcccaaagtgctggcattacaggggtgagccactgtgcctggtagtaactttttcaaagtatgtttacagagatgtattccctgtcctctctagtcaatgaaggctctgttcctttaacttgtgttcatctagtgttttgagagaggtttcctgaatgctaggagctaaaataaaacagacctggccgggtgctgtggctcatgcctgtaatcccggcactttgggaggccaaggcgggtggatcacctgaggtcaggagttcgaggccagcctggccaacatggcgaaaccctgtctctactaaaaatacaaaaattagccaggcgtggtggtgggcccctgtaatcccagctactggggaggctgaggctggagaatcacttgaacctgggaggcagaggttgcagtgagctgagatcttaccactgcactccagcctgggcagcaagagcagaactctgtctcaaaaaacaaacaaacaaacaaacaatcaaacaaaaagaggcccaaacctgacttcttccaggctttgtggatggctttgtcgtgcagcattccttgaacactcggcctgagttttgtttgttttttttttttttttgagacggagtctcgctctgtcacccaagctggagtgcagtggcgtggtcctggctcactgccagctctgcctcccgggttcacaccattctcctgcatcagcctcctgagtagctgggcctacaggtgcccgccaccacacccggctaagttttgtagttttagtagagacagggtttcaccgtgttagccaggatggtctggatctcctgacctcttgatctgcccgcctcagcctcccaaagtgctgggattacaggcgtgagccaccgcgcccggccgactgtttaaaactctgcgttagcctccaatttctgctgaactgagcctagagatcagccagtgccgaaacttagggcctcctcaggttttttctagaaatgtgttatttcctgggcagacgtgaggctttctcaattccccaggataccaaagtgcttttgattagcctaatttctgaagctaattttctctccagattgttttcctgggtcttagatggtctattctgtctcagtcatagactgttgttccagatggttgcaggctttttgttgacaatatttttatgtagtccctgccaatttttgaccccagttaggctttagtgtagttgaaacagagaagagagccttatttcagacttttcgtaggcccaggagaaattggagtatatgaagataatatttgcaaataaatataatatttgcaaataagatggtagaataggtcaccgcacctggcctgttctacattttcacttacctttttctctttgttcatctttctgtcaacagtgtggtgtgttgaatattatagtttcaaaatccttcatgtgtgttaggtaagctgtcactttctggtttagaagatttttagcatttttagacatttgttacctccattagttttgtttaagtagcttttattgactactaacaggtctgttttaatgatttaaggaatttcataaatattcatgagagatgacaccttggtgacatgcagttcttttttttttttttttttttttgagatggagtcttactcttgtcgcccaggttggagtgcaatggcgcagtcccagctcactgcaacctccacttcccgggttcaaacgattctcctgcctcagcctcccgagtagctgggattataggcacctgccaccacgcccggctaatttttgtatttttagtagagatgggttttcaccatgttggccaggctggtctcgaactcctggctttgtgatctgcccacctcggcctcctgaagtgctgggattgcaggtgtgagcccctgcgcctggctgacaagcggttctttagaagaacgtgtacaatctttatccatctttcattctcctttgatgttacctagtatttaaaaattttcctttaggatgatgaaatacatttcattaaccttacgttacacttcattaaatttagtttacggaaaaccggttgccagcttccaggtgttctcttattgtaatcacatagaatgggctaaatcccccaagtaacaagtgttgacagaacatatgaaatgttacgtaccaaggtcactcagacacttagtacccagagtttttttttcatggccatcttagtctgttttatgttcattagaatagaatgcctgaaattgggtaatatacaagaaatgatatttgttttgtacaattctggagtttgggaagtctaagggcacggtggcacatctggtgaaagccttgctggtggggactcttcactatctgaggcaatggaagaagggtattcctaggggagggggtgctagcttaggggtctcttcctcttcttctgaggccaccagtcttactcccaggatatctcatttactcattaaccctttcatccatcagtgaatgaacccattcatgaggcagagccctcatgacatagtcacctcttcaaggccccacttttgaatactgacaccttggggataaagtttcagtatgagttttggaggggacaaacattcaaacctagcagtgactgatcaggtatgcttctctgctgattatatcacaaaatttcaaactctcagaaggatgatggaaattaagcaaataccatattatttacttatttatttatttttcaatttaatttgagacagggcctcgctctgtcacccaggccggaggtcagtgtcacactcatggctcactgcagcctctacctcctgggttcaagcaatcctcccagctcaacctccctagtagctgggactacagacatgcgccattatgcctggctaatttttgtatgttttgtagagatggggtttcaccatgttgcccaggcttgtcctgaactcctgagctcaagcaatccactcgtctcagcctcctaaagtgctggcattacaggtgtgagccactatgcccagtggcaaatatcatattgttttaataaatagttgaggcacacagctccttttctttgttatgctggtgcagctctccttaaatctagctctgagataccatcatagttcaactttctaaataaacgtgtgtagggatatgttgtcttagagctgctaatattgtctcttgtagacaacacatagtaggactttgtcacgagagttagtatagacccactagacagaaagacactagaggtgatctgggcagcatatctcaactccctgaaatcatgaatgagaggcttgtccgtattggctattactttactgaatgtgttcaattctagcatcagaattgctgtgctggagaaaatgagtatagacagaggataagagtctgatgaccaaatcattgaataaatgtttggagtctatagcattgtgtgaacttcctctagagtgtagcttcctagtgctgtcagcctgaaccttcctcctctgccatgtgggatgtttcaggactcaatgatctttgaggatgtggctgtgaactttacccaggaggagtgggctttgctggatccgtcccagaagaaactctacagagatgtgatgtgggaaatcatcaggaacctgatgtctgtaggtaaggatgacatcatttcttcacttagtcaattacagaacaagtgtttcttggtcatctacactgctcaatgatttgaaacatggtagggaatacagtagactggcctgatgcagtggctcacggctgcaatcttagcactttgggaggccaaggtgggtggatcacttgaggtcatgagttcgagaccagcctggccaacatgatgataccccgtctctactaaaaatacaaaaattagccacgcgtggtagtgcacgcctgtagtcccagctactcaggaggctgaggtggaagaattgcttgaacttgggaggcagaggttgcagtgagccaagattgtgccactgcactcaagccttggccacagagcaagactccatctgaaaaaaaaaggaataccgtaaggccgggcatggtggctcacacctataatcccagcactttgggaggccgaggtgggtagatcatgaggtcaggagattgagaccatcctggctaacatggtgaaaccccatctctactaaaaatacaaaaaaaaattagccgggtgtggtggcgggcacctgtagtcccagctactcgggaggctgaggcaggagaatggcgtgaacccaggaggctgagcttgcagtgagccgagatagcgccactgcactctggcctgggtgaaagagcgagactccgtctcaaaaaaaaaaaaaaaaaaaaaaaagaatacagtagacccttgaacaaagtgggtgtcagagactcttaacctctgcacagttgatgatctggttttaacttttgactctataaaatgttaactgttggccgggtgcaggggctcacacctgtaatcccagcactttgggaggccgaggtgggtggatcccttgaggttaggagtttgagaccagcctggccaatgtgaaaccccatctctactaaaaatacaaaaaattaaccaagcatggtgccaggcacctgtaatcctggctactcaggaggctgagacaggagaactgcttcaacctgggaggtggaggttgcagcgagctgagatcatgccactgcactccagtctgggcaacgagagtgaaacttcgtctcaaataaaaagaaaaaaagctaaatgttaatagcctattgttgactggaagctttatcagtaacataaccagtcaattaatacatattttgtgtgttggtgtgtatgtgtaagtgtatattaggacagtgtctcactttgttactcaggctggagtgtaggggcatggtcatagcttaatacaacttagaactcctggggtcaagcaatcctcctgcctcagactcttgagtagctaggattgtaggcaagtgccaccatgctgggctgatttttaaattattttttgtggagatggaggtcttgctatgttgcccaggctggtctcaaactcttagcctcaagcagtcctcccacctcatccctaagtgctgggattataggtataaaccaccatgcctggtctgtttggtctattatatatggtattcttataataaagtaagctagaaaaaagaaatattatcaagaaaatcataaggaagtgaaaacatattgacttgattaagtggatcatcctaaaggaatccttttcattgttttcacattgagtagcctgaagaggaggggttggtcttgttccctcagaggcagcagaggttgataaaagtttgcatatgagtggacttgtgccatgcaagcccattttgttcaagggtcaataatattttggtgaataagtcaggcatggtcacagtgtcccatgaacatagaatctaaaatgtttctataattttgtaatcatttatcatgacttttatgggtctacattttaggaataaaatgggaagaccggaacattgaagatcagtacaaaaattccaggagaaatccaaggtaatttgcacttataacatgaagctgtgtcccttgagataatgttagagtgataggaaattatatttatttacttatgtattcatgtatctgagacaaggcttaatctgtcacataggctagagtgcagtggcatgatcatagcttactgcagccttgaacccctggactcaagccatcctcctttcttggcttcccagaatgctaggattacaggcatgagccactgtgcccagtggaaatttaaagaacaagcaaacaaagtgaagcagcccagcttcaaatttgttaatttttagaatgttttctccaaaaatatatacttaaatacatacacattcattgtttgcaaaatagttgccttggaaacagtattaagaaatcccatagtggccgggtgcggtggctcacgcctttaatcccagcactttgggaggctgaggagggcggatcacgaggtcaggagatcgagaccatcctggctaacatggtgaaaccccatctctactaaaaatacaaaaaaattagctaggcatggtggtgggcgcctgtagtcccagctgcttgggaggctgaggcaggagaatggcgtgaacccaggaggtggagcttgcagtgagccgagatggtgccactgcactccagcctgagtgacagagtgaaactccgtctcaaaaataaaataaaataaaaaaataaagaaaccccatagtggccagatgtggtggttgatgcttgtaatcccagtactttgggagtctgaatgggaagattgcttgagcccaggagtttgagaccagcctgggcaatgcagtgagaactcatctctacaagaaataaaaaaaatcagccaagcctggtggcgcatgcctgtaggcccagctacttgggaggctgaggtgggaggactgtctgagcctggaaggtggaggctgcagcgagctgtggtcataccactgcattccagcctgcgcaacagagtgagaccctgtttcaggaaaaaaaaaaaaaaaaaaagaataagaaaaaagaaactgcctagtaacatcactgttttgataatagctgtaatagagcccctttgcagagaattcagtccactcactgtcagacacttcagacagaacataaagcctacatttctcatgataatgtaaaatatgcaaatcaaatgcttgctaatataaaattatttatcaacaaattctttgtaatgtgcttcttattttttatagaaatcatatggcagagagactctgtgaatgtaaagatggtcaatgtggagaaactttcagcctgattccagatggtataatgaacaagaacactcttcctggggtaaaaccatgtgaaagcagtgtgtgtggagaaggcaacgtggatcattcatctctgaattgctacatcagagctgacactggacacaaaccgtatgagtgtcaggaacatggagagaagccacataaatgtaagcagtgtgtaaaaaccttcagctgcctccactccttccaaacacatgaaaagcctcacacaggagagaaaccctatgattgtaaggaatgggaaaaaaccttcgattctccccaaaccgttcgaagatacagggtagtgcacagtggagatggaccttataaatgtaagttttgtgggaaagcctttgataatctcagtttatatctcacacatgaaagatctcatactggacagaagccatatgaatgtaatgaatgtgggaaagcctttggttttcccagctcctttcatagacatgaaagaatgcacaccggggagaaaccatatgaatgtaagcaatgtgggaaaacctttagttgttccagttccattaaaaaacatgaaagaatccacactggagagaagccctatgaatgcaagcaatgtgggaaagccttcgcttcttccaattcctttcagtatcatgaaaggactcacactggagagaaaccctatgaatgtaagcaatgtgggaaagcctttaattgttccagttcccttagaaaacatgcaagaattcacactggagagaaaccctatatatgtaaacaatgtggtaaagcttttagatttcccagttctattaaaaatcatgaaaagactcacactggagagaagccctatgaatgtcaggaatgtgggaaagccttcagatattccagttcacttcgagtacataaaagaattcacactggagagaagccgtatgaatgtgaggactgtgggaaagccttcagtcatcccacgacctttcatagacataaaattacccacactgcagagaaaccttatgaatgtcaggaatgtggggaagccttccgttatcctgttgcttttcgtagacataaaattacccacactgcagagaaactttgagtgtaaggaatgtgggaaagccttctgttatcacagttcccttcaaagacatgaaaggactcacaacggagaaaagttgtgtggatataaaaaatgtaaagccggctgggtgcggtggctgacgcctgtaatcccagcactttgggaggccaaggcgggcggatcatgaggtcaagagattgagaccatcatggccaacatggtaaaaccccatctctactaaaaatacaaaaattagctgggcgtggtggcatgtgcctgtagtaccagctacttgggaggctgaggcaggagaattgcttgaacctgggaggtggaggttgcagtgaaccgagattgtgccactgtactccagccaggtgacagagtgagactccgtctcaaaaaaaaaaaaaaaaaaagtaaagccttccactattccagtaccttctgaaaccatgaaagaactgacacttgagaaaaacaatgatgttaggaacatgggaaacctttcctttctctctcaatcgtttgaaggcatatggtgtgacatgctggcgatagacctcataactgtaaggaacatggaaaacgattcttgttttccatgctccttgtttattttagatacatgaaagaatttactctggagagaaactatgagtgtaaaaaatgtggtaacgccttgtgtagtttctgtttctctgaaatactgtcatgtcctggtattctcaggggattagttgcaggcaccccgctccccacttcagaacatctaaatctgaagatgctcaagtgctttatataaaatggtgtattttcctagaacctaagcacatcctcttgtacactttaaatcatctctaggttatccatactgcctaatgcattgtaaacgatataaaaatagttgtttcattgtgttatttagggaatgctgacaagaaaaaacatctgtagatgtttaatacagataaccatcacatgcccacctccatagtacaggcccacctcatagtatatgtcagctacaatgaaacattttcttttttttttaaaaaacgttttggattggtttcatttaatggcctcaaaaacacgtgttaacattctccaaatccttggttcttctctcctgataaccctcatgtgatgattgctctgtggttcctaaagctgcagtgtgttgaggtgcttagatatgtggcagtgtagataagtcaggggacatcagtttaacttgaattttctttttttttttttttgagatggagtcttgctctgtcacccaggctggagtgcaatggtgtgatctcggctcactgcaacctccacctcctgggctcaagtgattctcctgcctcagcctcccaaccagctgggattacaggtgcccgccaccacacccggctaatttttgtatttttagaagagatggggtttcaccatgttggccaggctggtcttgaactcctgacgtcgtgatctgcccaccttgacctcccaaagtgctgggactacaggaatgagccaccctgcccggccagaattttctttcaggacatcaggaggatcctctgctggaagaaccaacatctgattgcagatgttgcctctttggtggaaggtcagtaacacaaatcttggatctgtggtgtttgagggctgaaaatatttaagcatcgaactttcagtcctttttttttttctttttttttgagatggagtctctgtcgcccaggctggagtgcagtggcacgatctcagctcactgcaacctctgcctcccaggttcaagcgattctcctgcctcagcctcccaaatagctgggattacaggcgcacaccaccatccccagctaaattttgtatttgtagcagagacagggtttcatcatgttggccaggctggtcttgaactcctgatctctgatgatctgcccaccttggcctcccaaagtgctgggattataggcgtgagccaccgcaccctgctgaagtttcagtcttcataattgcagatgctttagttggaaacgttgtcataggaaaagctgttttttctttctctttgaatcatcaaacacatcttgcaatggttttggccatgttatctctggtgacctggaagcgactttgatattaagcttcagagtatgctgaaacaagtcaagacttttggtgatgttaggatggtaagcatgtattttgcatgtgaggtcataaatttagggagcaggtagaaaattattgctttatttgtcccctgaaattcatattattattatttttttgagagagttttgctcttgttgcctaggctggagcgcaatggcacaatcttggctcaatgcaacctccacctcctggtttcaagcgattctcctgcctcagcctcccaagtagctgagactgtaggcatacgccaccgtacccggctaattttttgtatttagtagagacagggtttcaccatgttggtcaggctggtctccaactcctgacctcaggtgatccatgcacctcggcctcccaaagtgccgggattatagagatgcgccaccacgcccagccctgaaattcatattttgaaaccttactccctaatgtatggaatgaggagataggatgcctgggaggtaattaggattacttgggatcatgagggtagagttctcaggaatgggactataaggttccctagagagcttgcatttgctctctattatgtgaggacacaatgagatgaaagccttctttgaacaaggaagcttgcccttaccaggcactgaatctactatcactttgatcttggagttcacaatctcctgtatactgaggagcaaatgttaggtgtttaatacacccagcttatgtcattttgttttaggagcccctggtggataaagcacaaccccattaaaaaataggtgaaggagttgaatagacatttctctaatgaggatgtacaaatagacaataattacataaagaagatgttcagcatcactcatggtttagggacatgcaaatcaagagcaaaatgacatctatatcccctcaccctcattagtttgcttctgtccaagaacaaaataacatgctggcaacgatgtggaatagtgaggacccttgtacactattgatggaaatgcaaaatgtcacaactacttttgaaaactatatggcaggccgggtgcggtggctcatgcctgtaatcccagcactttgggagcctgaagtgggcagatcacctgagattgggagttgaagaccagcctgaccaagatggagaaaccccatctctactaaaaatacaaaaaaattagccgggcatggtggcccatgcttgtaatcccagctactcaggaggctgaggcaggagaatcacttgaacccgggaggcggaggttacagtgagtggagatcgcgccattgcactccagcctgggcaacaagagcgaaagtccatctcaaaaaaaaaaacaaaaaaacaaaaaaaaaaacaactgtgtggcaggtaatcaatacattgaaaaaatggaaataacatccaccatttttcccttctgggaatataagcaaaagaatagagacgggggcctgaaatgggtatttgtatacatggtatagcagtataacttaccaatagggaaaatgtggaagcaactctcttgtatattgacagatggatgaataagcaaaaggtagtatatgcataggatagactattactctgccttcaaacggaagggtgacctgacaaatgctacagcattgatgaacttggagcacattatgctaagtgaaatagtccattcatataaagacacaccttataaggtcgagtcacttgattttttacaacctgtctccagacatgggctccttaaactccagacccaaaatgtttttgcttatatgaggtactcagaggagtcaaattcataaagaaagtagaatggtgattgtgtggaataggggaagtgggtaatggagacttatgatttaatggcataaagtttcaatattgcaagatgaaaagggttctggagatagatggtggtgatggctgcacaccaatatgaacgtactgaaagccagtaattctacacttaaaaattaagatgggccgggcacagtggctcacgcttgtaatcccagcactttgggaggccgaggtgggtggatcacctgaggtcaggagttggagaccagcctggccaaaatggcaaaaccccgtctctactaaaaatacaaaaatgagctgggcatggtggtgcatgcctgtaagcccagttactcaggaggctgaggcaggaggatctcttgaacccgggaggctgaggttgcagtgagctgagattgtgccactgcactccagcctgggagacagagcaagactccatctcaacaacaacaacaaaaaattgttaagatgataaattgtattttttctgtattttagtaccattaaaatacgtgggattggtcagagtggtggatagggaaaggacgcaaaccttctgagaggttggaaggttctgcagagccctgggggagaatagctgaaggtggctgttctataaccctgaggcagagggcatggagtaggtacaagggagtgtgggggaatttatcttaaacaggcttgtttacttgtgttgaccaggaactgacctttcatcatccctgtgcctgacgttccctgaaaggggaacaataagtgttaattacctacaggttgtgttggctccaggtttttggcattgtgcctagactgaataaaagcaagcagctccagcttcttggggctgctttctggccactagagccaggcagtcacctagttgctgttacactgaatacctgtgtctgagtcctcatttcatccgttggccagggtctgcaggacagacccggcattaaaagagtggggagccacagtagtgcaaagaccccactggaccaccaacataccaagcagttcttggttcaatccctccttgtcctcaacactgtttttccattttccttgtccataaaggacctgtttccacatgcttgctttgactctgatgtcacctttagagttgatgctcaggcatagctcacttaactgcctcaccttttctctcctgatctggttgttgatggctgttgtgagacattggttgttgcctttttagtttaaaaggattcaaatgacacacagcaatggagatgcagtatatggcaatttattgcaaacgaaaaagtattttgaaagttaagtgcagaacagacagtatgccctgagagagagaggaggattcagggcaggctgctcataaggatgagacagcaaacagtggcactagggagactttttaaaaaaattttaatagttagatttcagctcttttgagtggtttcaagtctgctgtggaggaagggggtagggggaaggtgggcatagcccgagaggcaacagactccagaacattccagacacagtccttcagaggctggctagtattaaggaaagtggttaggtttgtgaggtgaaacagtggatgcttgtggcttttccgcagtgtgtgcagtcaggccagcttgacttggaggaaagccattcaacacaaaaatggcaccacagttaccctggaggtaactgtgaagcacagggtttgagccacctccatcatcctcagggcactgtgtgtttcaggatactctgtggcactgctttcttttcttttcttttcttttttttttttttttttggacggagtctcgctctgtcgtccaggctggagtgcagtggtgcgatctcggctcactgcaagctccgcctcccgggttctcgccattctcctgcctcagcctcccgagtagctgggattacaggcgcccgccaccgcgcccagctaatttctttttgtatttttagtagagacgaggtttcactgtgttagccagggatggtctcaatctcctgaccttgtgatccgcccgcctcggcctcccaaagtgctgggattacaggcgtgagccacagcgcctggccgagagactccttttatgggaatcttacatgattattcataaggggctgggaagaggtgttactagtaagcacattctgggtggtcttctgggtgcacatgcacagtagctgcccattcttgttcatacgtcacatctcattagcatcttaaatctccacccagggatgtggtttttactattataatgagcaaagggtcaatctgaagacaggtaaaataaaaatacgcgtgctccctacaggggaaattccctactggagagagctttgcttgaatgagcttgactacaatgcgaatgctgaggcttattgtgttgactgtacgattgccaagtctccaggacatggttacttccttggctacctatcctgtctcatggtcctcagtcacttcacacccatgatgtatgctaacacccttcggttatctgtttagaagggataattattatttttttctttttgagacagagtctcgctctgttgccaggctggagtgcagtggcacgatctcagctccctgcaacctctgccttctgtgttcaagcaattctcctgcctcagcctcccgagtagctggaactataggcatgtgccaccatacccagctaatttttgtatttttagtagacgaggtttcaccatgttggccaggatggtgtcgatcttctgacctcgtgatccactcgcctcggcctcccaatgtgctgggattacaggcatgagccaccgcgcccagtctagaagttataattttaactttccctgaagaacactcataaacataagttaaggattgcaatgttttgttcatgaacaaatcttccagactgtgagaattaagcaagataaactgaaaataataataatgcgatacagattttcctaactacagaaaattgaggaaacatactacaaaatgtggaatgactgacctttaattctacctgggctggaggttcaagaaatggacagaaggggtcactacatgcacaggaaagaatttcctaattttaccagtagagctgatgttgaaggagaaatatgtgctgtaacaagagaacttcaaagtaggatgaatgaaggaaatcttacccccctaataatatggaatttatgcagaatcaatttttacttcagaaggtcagtaaattctgctttcatccaatgtctttacatgtagaattatttttcattatcattgttcttaccttttgtagtgattactctgttgtttatcaagtaaatgataacccgttaccatcagcatcacttttcttgtgatatatagctaactttcagtgatgtacaaaaatatttatcaactatagctttcatatttttgcattcttggggtattttgttacatgtataacaactcttgagattccacacataacaatacattcttaggattattactttgccattggtagtcactgggtttgtccacttcctgtatggtgttatttgcaaatgaaatacacacatactacatttttatatgtggtaggtccaacaacctatcaactgattattttacaggtgaagaaatacacatttagtctgtcttttatagttataatattctttaatagtcatctttgttttctcttgttttttgccatcatttgatgtcagactgaagaactttctttggtctttcttgtaaggcttgtgtgctggaaataagttctcttagtatgtatgcttaaacctgggaaagtctttgttttgacttctgatttgaatgtgagctttggtggatatagaaatgttctattatatatgtttcagagcagaggaatagcatctaactaaaagcaaatatgtctatttcacccaaacacttatcattacactagtttatataagttaatgtcaaaaaacaatgagcaataaataggaataggatggaagaaggaaatattgtgattgaagatgaaaccgttgtttgggaaagtaaagacaaaacaactggaaaaaaattttaagctggggaaggaggcaatttgctgtgtatggagcaaacatactattgaattaaaatcacatttcttgaaaatgtatattaatttctaagaatagcactaataccctatgccgtatctgtggaaaggtatgagtatttcctgatgaaatgacctgagtgtcacctctatagatttatatataactttgatggattgaaggttcctcatcccagtcctcactgtagagaaatggtttaaatataagtaattcaggaatctgatccaaattaactcgtgtataatattccagaaaaattcacaacatcaaagaaatgttttgaaatttatacttttttttctgacagagggcctcactgtgtcacccaggctggagtgcagtggtgtgatctcacctcattgcagccttgacttagtggactccagaaagcctcttgcctcagcctcccaaatagcagggactacaggcataggccatcacacctgactcattttttaattttaatttttttttttggtagagacagggtctcactatgttgtccagtccaggctgcctcaaacccctgggctcaagcaatcctcccaactcagcctcccaaagtgctgggattataggccattgctcccagcttattttttatttattattattattattattatttttttttttttgagacagagtctcactcttttgcccaggctggagtgcagtggcgctatctcggctcactgcaagctccgcctcccggattcactccattctcctggctcagcctcccgagtagctgggactacaggcgcccgccatcgcgcccgattgaggttttgtatttttaatagagacagggtttcaccgtgttagccaggatggtctcgatctcctgacctcgtgatccgcccacctcggcctcccaaagtgctgggattacacgcgtaagccaccgcgcccggcctatttttaattttttttagtcatggtttagcttgatcacccaggctgttctaaaactcctgggctcaaaagatccttcccgcctcagcctccctctggggtagctgggaccacaagtacttgccaactcacccagccttttattatcagtgcctaatgcttaaggaggatgtgggctaccttttactttcagataaaaaacattgaggtgagataattctgttaattttttttaacacaaaggttcataacttgaataggtagtttcttgcctaaatcatttaattaaaaaatttcgttttcattttgtagtctcttggatcttggagttgattgaaatgtatttttaatagccaagtagattcacttttatatggttttaaaattgttgtgtatataaggggcatttgaaacattagatttttgtatttgctgtgactttcctactggccagtgtgccaggtaccggatatcctccgggaactgcaggcaggcccgtctctctttcacgggtgagagccgcagcctactcttggcggaagcggaaaccctttcctccatcacgtttcgcccattccaggccagaagcaggccccgctccttgctgctcgcctgtgagcatatttcgtcgaatcccggctgggcggcttggtcgcagtgtgcctgtgctgggcccggagcgcgttcatcgcccacagccgctccagttcttgcgagtggttgttcctgcacgccaggagccgtgggccgggccatcaggccatacaagtgctgcgaaagcggcctcgccttcggctgcatcatctcggggatgtttcacttgtctcttctcccagttccagccccagcccctcgaactcaccgggtctccacagcacactctgatcaatatcccacaggtgaggaatataaaatactctttataaagtggaagctagtaagtcgttcttttcaaactttcacaagaaactacagatctttttaaaagattctgattcagcaggtcattggggaaggcctgatcctctgcatttctgactcggtccccagtgtcgtccatgctgctggtccgcggaccgcagttagagtgctgaggtagtaatagacctggttaggcaggcaggcaggcaagggactgatcccatggagcctggtgggccgtattaaggacttttattggatttcgagcagagaagcgacgtttgggttgtgttttaagaagctacagaacaagttctgccaaagtggaagcaaagacaggttacccactcctcttttgcctcctcgcctcttgcctcgtcgcgggtgagctatgactatctggggcagtggtgcgccgggggtaaaagtatttaccaagacaattgtaggtaaaggaaggcaggtttatcggagaaagtatgaaaattcgttgcgaggcagcaacaggcaggtcagcagaagagaagctgaatgcagggaaacaggcttgctgaggattttatggactggaactttggctgattgataacgccaaggcagcagggggctaatttgcatttttctggccgctgtggtgtttgataaattgaagcgtttgttgataagcaggaagtttgagttatgtatgttatctgagcaggagggccatatgtcctgggccataaagcagacctataacttatctgcctctttttgtttatatgtcctggaccatgaagaaaggcagatttgtagcttatttactttatctctttgctttctgcggctctcgccagcctgatttttttctcccctaattaggactctgcgtgcctgattgcttttctctgccttccttacttgcaactcccaaggtcatgtgtccgtgagagtggacctaactcagccgctaactcagcctcgagctacacaaaaaagggactggactgggctaaggcttcaaaaaagggtgggccttgggtaagatgttccagctggtccagcaccctcctgtcccatttcccaggccctggcagtccagaattgagtaaaacatactgagataaccctccactggtgaacctggaggaagatccatcctgtaggaggtgagagcctgggaaaggacatcactatggagggaactgaagttggggtggaggtcggtggatggggtattggaagtggcttgagaccaggagatgagtttaaagtcctcaggtgcctgtgggtaaagttctgacaaaggaaccaggaagaaataagagtcagatgatgaaaaggatcaggactgggggaaaaaacaaggacccaacctggtgatcgggattaaacaattattctgggcaggcaagggcaagaaatagataataaactggaaaaagaaatcgctggtgtaggagggatatcagctgagaagagttggtccaaggctcttggtctacactccacatcctgtggggtgcacctggtgggcaactaggagagaagaagggcccgacgtccagtaagggaatcagaatgtgaatgccgtattgctgtggggaaggatcacaggccacctggagccacctaagtgaaaaccagggtcagtgcctggggatggaaggatctgaatggaaactcacttaaggccaggtggggtgacctgagtagcaaacaggtaaaagttgggtaggaggacctgatttggatggggctgctcactgtgatgtctatgaagctatcattccagctgctgtccacctaggagcagttggtcagtacagtcagctgcgtgttcccatcttgtgtatgagggcagtactgaaggctgcccttcatgcctgccttgatcactggcaggagacagaggacgtggaagtatgggttgtttggggggatggtgcctatgaggaaggtctgatcccaaatctagagaatgggagggtgggatgtatcatggagggtcaggccgggggtctggaggatatcatgtcctaaatgcagatgttctctgggtctcaggtccctgctaccagcccagcctggtgaggctccagatgagtcaataaccctggctcaggagagctggtgtaggatctgttaggccaaggggtctggcttccttactacctcccacttctacctctgtagaaatgtctgtctccagcatcatgtcaaagcaactgatgacttccctaccccaggcatcactgagctaaactgggtggcaggaaggtgatcaccacctaagtactatctttttttttattttgtattttgagacagagtctcactgtgttgcccaggctggagtgtagtggctccatcttggctcactgcaagttccacctcccaggttcacgccattctcctgcctcagcctcccgagtagctgggactataggcgcccgccaccatgcctggctaattttttgtatttttagtagagacggggtttcaccatgttagccaggatggtctcgatctcctgacctcgtgatccacctgcctcggcctctcaaagtgctgggattacaggtgtgagccactgtgcctggcccacccaagtagtatcttatcccttctctccttttcatcccagcctgtgcccactgatcgcttggttaccggtcccattatccactccagctcctggtacttctcttctgggtacagctgaaccacctgggaagagcaagctaagaagttctggtgccccccttgcagcaaggctatcagtgggcacaagaggatggggggatgggctggagtaagccctacccagagcaggagggagccccacacagttctccctcagctgttaacttcctagagacccacctcacagtcaagagcaccaacgggcactcctccctccactccccttactggggcaccagtttctttccaccccaggtgttcactatccccgttatttcaattctcatggctcacaggaagaaataggtatattgtactgagatttttctttctttttttttttttaaaaaaaaaagacatttattcagcatcacgatcagactattacatttagcaatcaacagcatggggtgcaaaaagaaatctacgttaaaaccctttgttggaatgctttacactttccacagaacagaaactaaaataacctgttatacaattagtcacaaatacagtcctcgagttttttgcccatacacatgagtatttgtctaaaacatgtcttctttgtagcagctaggccctgccaccactgtgcttggctgagttcacaaatctattgtaacctgtagcttccctgtcacttctctggctctcctctcctgctaagctttgtttcctaattaaaatcttctgccactgccatagctactgctgctgctggaaccgccatagccacttggtttcgtggttttgcaaagtattggcctccaccgccataggggccagagcttctgcctccaaaatttcctcccttcatgggtccaaaatttgaagactgattgttgtaattgccaaaatcattgtagcttccaccacctccaaaattgcttccatcattaccaaatccattatagccatccccactgccaccatatccaccaccaccatggctgccaccaaagccaccacgaccactgaagtttcctccacgaccgaagttgtcattcccaccgaaaccacctccacgaccaccaccaaagtttccagaaccacttcgacctctttggctggatgaagcactagccatctcttgctttgacagggcttttctaacttcacagttgtggccattcacagtatggtatttctgaatgacagtcttatccacggagtcatggtcgtcaaaggttacaaaggcaaagccccttttcttgccactgcctcggtcagtcatgatttcaatcacttcaatttttccatactgttcaaaataatctcttaggtgatgttcttcagtgtcttctttaatgccaccaacaaatatctttttcacagttaagtgggcacctggtctttgagaatcttctctggagacagctctctttggttccacaactcttccatccaccttgtgtggccttgcattcatagctgcatccacctcctccacagtggcatacgtgacaaacccaaagcccctggagcgcttggtgtttggatctctcattaccacacagtccgtgagcgttccccattgctcaaaatggctcctcaggctctcatcagttgtttcaaagctcaaccctccaatgaagagcttcctcagctgttcgggctctttaggagactctgacttagacatgacggcagggtgaagagagactttaacgatgcttcttcggcggtgtccacgggcagaaaagcgagatttttctaaatgacataaaaatatgtattcgtgaaacagtcttttcaagataaggatcccatccatcggactcaaacattacccgctggtccttggtaatcttgccccaccctagtgcttcttctctctcagccacccctgatggaatcctgcagtttgtactgttctgtgtcaggcatctttcactcagcataattgagcttcatccaatagttctttattgtacatgaataatattccatcttcagaggaagcaaaatttatttctccagctgttgatggatatttgggttaatttcagtttttggctattaagaattaaacatatgaatattcacataccagtgtttgtaagaacatatgatatttcttttttgtttgtttgagacagcctcgctctgtcaccaggctgaagtgtagtggcgcaatcttggctcactgcaacctccgcctcccaggttcaagccattctcctgcttcagccttctgagtagttgggactacaggtgcgtgccaccacgcccagctaatttttgtatttttagtagaggtggagtttcactatgttggccaggctggccttgatctcttgaacctcgtgatccgcccacctcagcctcctaaagtgctgggattacaggcatgagccactgtgcccagctgattatttctttagaagattttattttattctacctaggaataaaatggctgggtgttgtgacaggtgtatgtttaacttcttaggaaacttccaaactgttttccaagtggctgttccattttgtattcccaccaacgtcataagagttccagttgcttcgcattgtcaccaacatttgatatagccaatcttactaattttagactcccaaatatgtgtagtggtattagaattgtggcttaatgccaggcacagtggctcacgcctgtaatcccagcactttgggaggccaaggcgggcggatcacgaggtcaggagatcgagaccatcctggctaacacggtgaaaccccatctctactaaaaatacaaacaattagccaggtgtggtggtgggcgcctgttgtcccagctactccggaggctgaggcaggagaatggtgtgaacctgggaggcggagcttgcagtgagccgagatagtgccactgcactccagcctgggtgacagatcgagactccacctcaaaaaaaaaaaaaattgtggcttaagtttgtgtttacttaatgaatgatgatgttgaatgatatttcatgtttttatttgtcactgaaaaatattctgtggtcaagtattaatgacattgattgttttcagattattagtttttgagagttctttatatattctggatataattgctgcatcagattatggtttgtatgtattttctcccatctacggctattctttaaaaatccttagcagtctctaggccgggagtggtggctcatgcctgtaatcccagcactttgggaggccaaggcgggcagatcacttgaggtcgggagttcgagaccagcctgaccaacatggagaaaccccatctctactaaaaacacaaaattagccaggcatggtggcacatgcctgtaatcccagctactcgggaggctgaggtaggagaatcgcttgaagctgagaggcagaggttgcggtgagccgagattgcgccattgcactccagcctgggcaacaagagcaaaactccgtctcaaaaaaaaaaaaaaaaaatccttagcagtcttatgcctataattccagtactttgggaggccaaggcgggcagatcacttgaggtcaggagttcgagaccagcctggccaacatggtgaaaccccatctctactaaaaatagaaaaattaaccaggcatgatggtgtgtgcctgtactcccagctacttgggaggctgtggtgggagaattacttgaacctgggaggcggaggttgcagtgagccgagatcatgacactgtactccagcctgggtgacagagcgagactctgtctcaaaaaaaaaaaaaaaaaaaattccttaactgtatccttcacaaagcaaatttttattttaatgaagtttaatttctcaatttttaatggattctgcatctttgtcatatgtatgcaattgtaacgtaacccaaggtcaaataatttcacccacattttctttacattttatagtttagattatacattcagttttgtgatccattttgagttaatgtttgtatatagtgcaagacacagatctacagtctttactttttgcatatgcatattctattttttagcattatttgttgagaagagaaattttgactcaattgttcactttgattaaaaaaaactactggaccacatgtgtagaaatgttactggaacatttattctgttccatggatatatttgtctacttgccaaagacattgtcttgattaggattgctaaattttctttgtttttttttcagaattatttggctatttgtttggttatttcaggtacttttcaccttttttttttttttttttttgagatggagtttcactcttgttgcccaggctggacaacaacgacaacgcgatctcggctcaccgcaacctccgcctcccgagttcaagtgattctcctgtctcagcatcccaagtagctgggattataggcatgcgccaccatgcccagctaattttgtgtttttagtagagatggagtttctccatgttggtcaggctggtttcaaactcccgacctcaggtgatcctcctgcctcggcctcccaaagtgcttgggattacaggcatgagccaccacgcccggccttcatcataattttataacttcataatacattgttctttttctttttcttttttaaaagattcaatgattttttttaaagcaataaaaaatagtaaaaaaccctttgtgtttactgaagtggttatcatttctggtcctcttctttctttccggatttccacttggcttcatttttctttgcacccatgcagtttagggatgtctcttatggagcaagtatgctgattacaaacactttcactatggctgaattaataatttattttcccttcatttggaaagatattgtttgctggatataggattctcagttgatatacttgttctttcattactttaaggtagttgttctatggtctcctgatctgcgctgttgctggtaataagtatgtaatgaatcctatctttggttcagtgtagttaatgtgtctttttcctgttgccttaaagctattttaattgttcttgctgtgaagtagtttactgatgatgtgcttggtgtagatttatatacatatatgctcatggtttgttgaacttttttgatttctgggtttataattttcatccagtttggcaaatgtgaaaccagtatttgttgaaatattttttgtcatgctctttcctctgccaaagagtcttgttatttgcatattatgtcacttgtaattttcccactacacagctcactgattttctgttttttgttgttgttgttttttttgctgggtgcttcatttgggatagtttctactgctaggtcacaaggttcactcgtcttcttctctgcagtatctgatttgctgtttattccactcagtgtaatttgttatcccagatgttgttttcatgcctagtagcttgaatcatgtttttttctttagtttttagattgtttggaggtaaaatatactaacagagaatttgccatttcgatcatttttaaaatgtgccatttagttgtagtaaataaatttacgatgtggtgtaaccaacgcagctattgatctctagcattctctcatcactctaaacagaaattgggtactcattaaacacgtccccagtctcccttccccccagctcctgataatgtctatcctactttctctatgaatttggctattctaggcacctcatataacgggaaggatacaatatttgtccttgtgctgggcatggtggtttatgcctgtaatcccagcactttgggaggctgaggcaggcagatcacgaggtcaggagttcgagaccagcctgaccaacatggtgaaaccccgtctctactaaaaatacaaaaattagccaggtatggtggtgtgcacctgtaatcccagctactcaggaggctgaggcaggagaatcgcttgaacctgggaggcagagattgcagtgagccaagatcacaccactgcactccagcctggatgacagagtgagactctgtctcaaaacaaaacaaaacaaaaaatttgtccttgtgtgtctggcttatttcacttagcataatgttttccaggttcattcgggttgtatcatgtatgaggaattcattgctttttctgtctgaatgatacttcattgcacggagaaaccacactttgtgtgtctactctaaacacttttctttttttgtaaagattttaaaaatatatttaaaaactagtttgagagtaattgaattaaatcattgactggaagagttgtttctacagtaatattttggctactgtgaattaagatggctatgaaattggtatacatgtgtctgtgtaagaccctgcttttacttcttttgggtatatacctagaagtggaattgctggtgtaaagagtaatggatgtttcccttttctttttttcttttttcttttttttgagacggagtcttgctctgtcacccaggctggagtgcagtggtgcgatcttggctcactgcaagctccgcctcccgggttcacaccattctcctgcttcagcttcccgagtagctgggactacaggcgcccgccaccaggcctggctaattttttgtatttttagtagagacggggtttcaccatgttagccaggttggtctcgaactcctgacctcatgatccacccgcctcagcctcccaaagtgctgggattacaggcatgagccgctgtgcctgtcctgtttttgtttttgtttttgagatggagtttcgttcttgctgcccaggctagagtgcaatggcgtgatctcggctcatggcaacctctgcctcccgggttcaagtgattctcctgcctcagcctcccgagtagctgggattacaggcatgcaccaccacgcccggctaatttattttgtatttttagtagagacggggtttctccacgttggtctggttggtctcaaactcccgacctcaggtgatccacccacctcggcctcccaaagtgctgggattacaggggtgagccaccacacctgaccttccttttaaatttttaaaatgtttgcttcatatattttgggcctctgttatttagtgcaattatatttataactgttatatattctgtatgatttgagccttttatagtgctcttctttgtgtcttttaacagtttttgacttagtctattttgtgtgacaattgtatagccacccctgctctctttacattactatttgcatggaatatctttttctttcattctctttcaactgacttgggtattgagatctacaatgaatgtgctgtagacaggatacaatttgatcatattttaaagattcattctccctgcctctgtcttttgtttggcaagtttattccatttaattaccgataacgaaggcattatgtctgccattgtactattcgtgttctgtatgactaatagctttgtttttcataaaatacgaggaattccttatgttttcaaaatcagtgtctagtttcttggcttttgattggaaacttttattaacacttaaaggagggagcatagccacactctgcagaggggacaagagggcaagttgaactcccagagctgaatccttatgtatcttgcctcatcaccatgacttggtaatgaggcagggacactctggggacccatttctttttcttatcttttttcttttttgagacagagttttgctctttcgcccaggctggagtgaagtggcacaatcttggctcactgcaacctctgtccgctccccccgccgccccaccccgggttcaagcgattctcctgcctcagcctcctgagtagctgggattacaggcgcccaccatcatgcctggctaatttttgtatttttagtagagacggggtttcaccgtattggcaaggtttgtctcgaactcctgacctcaggtgatccatccgcattggcctcccaaaatgctgggattacaggtgtgagccaccgcacccggcctctggggacccatttcaacagtctggcacccatggttgggaatatgtttaacctctaaattggggttttcctgctgaactgcgtctgaaagactgcttctctgagctagctcatgtttttgctttttctctctattgattcctttatagaatattgctgtcatataagtccagcttttccgtgaatttaacagttttatcctgttatcgatgtgtttttattttcttgaaaataagcagattgagacatcagatgggagaaaggcttgactatgtcgccagcagcctcatgccaaattcctgattcctggaggacagagcccccctcctgctccaaggccaggagatggcgccactggacagtgagtctgggattcctagcacacacttgtgattgctggtccaggaaaaagaagcaggaagggccattagtacaatcagtcaggaaattctgcttaagtgcacatttctccccaggagagtcgggtcactgcactgggaggaagcccgcctgccaagggctgtgtctggaacctgttcatcgcgctccactcagcacagtgagatcgcctcttctgttactcggtctccagggggcgggacctggagccgtatccaatcagggccatggggtggggtcgtgagaactgtggatcaggcgcactgcagggaggtgggtgcgcggcatcttcacccctctaaatgcggctcctactctgtagctgacagacacccacagacgtgtctgtagcatcctctgtcacactgggacccgtactggcagcaggagccgtagggaggactgggacacctggaagccaggaattggtgagtgtgcggggctgagggtcccgagactaggatgggactggttggaaccggcaggaatagaccgtggcgggacccgggcctcttcgtagttgactctgggttctgagacccaagtccccctggcgcacctcggccctggttcctctcaggccgcagggtggggctgcgacggcagccgagacccctagccgtccggtccagtccctgtgcaactgactgtggccccaggcccagcgccctctctggtcagctccgcgcccgctgccccagtcacgcccgctgcctccgtgtctccccagattgtacgggggccactagagggtcatgggggaaatcctgcctcgagtatggggttcgtgtgagaggagctgtaggctgtggggtccccagttccctctttctcaccaggggcttttgtattttatctgagtttcccaaatatacgcgaagcagggtctcaaatccgcgactgtggtccctaggctaccttctcctaaggctggcagcaaatttgggatttcctgatccctttccgcattttataacacggatttcctttagttcacaacagtatcacttcttcgtcctccaggctatgtttcaaacacaggcagtattttaatcgtcatttttttagagggcagtatatggccgttttaaaaatatttgttttgtgtttgtgaacgtttcagagaaaaaccacctgacactccgctgtaaacaatctttgtgtctctttttatctgccctaggcacagacaccttctgagaatgtcttgggttgagattcccctttggaaactttacagtgatgcgacctcagcccaccctctgccttttcctgatcctgggtttcaggactacctggggctggcccaagatgcctacagctgccaagtctcttgggaaagtctagtgaatatcagcccctaggtcgttcctcccaaagagcctgaggtgtggcggtgaggcctccccagggagcagctggatgctatggggtgggaccagtctcctatatcattattgtaaaaaactaatcccttgggacacgccttttcttctccaacccgtttccattccttggggacacatggctagtcagccaatcaaattctggtatggaggaaaccaaattatttctgtcctgtaatcctagcactttgggaggccaaggtgggtggatcacctgaggtcaggagttcaagaccagcctggccaacatggtgaaaccccgactctactaaaaatccaaaaattagctgggcgtggtggtgcacccttgtaatctcagctactcgtgaggctgaggcagaattgctagaacccgggaggtggaggttgcagtgagctgagattgcgccactgcactccagcctgggcgacagggcaagactccgtctcaaaaaaaaaaaaaaaaaaagaagaaatgatttctgtcctctggattctctcagtctagtgaaagaagaaaaccacccccaatgagttgttgcaaggacctgaaaagcacacagttgagtgtcttctgggagggtggtcactgagcacttcagggagcagcttggaggtggggggatgtcccaagtgataggatgatgtgacctgacacttgagtcagacacttgagtgtttcaggtcagcactgcccctccctgggtttatcaccttgaaaaaattggtttactcatttcagcttcaggtttttttttttttttttgagacggagtttcactgttgttgcccaggctggagtgcaatgacgcgatctcggtttgccgcaacctccgcctcccaggttcaagtaattcttctgcctcagtctcccaggtagctgggattacaggcatgtgccacaatgcccacctaattttgtatgtttagtagagatggggtttcaccatgttggtcaggctggtctcgaactcccgacctcaggtgatctgcccacctcagcctcccaaagtgctgggattacaggcgtgagccaccatgcccagccatcagcttcagttttttttttttttttcttttaggattgcttttatgagctaggcatatttgtatgggaagggggaatttttttttctttttttagtatttatttatcattcttgggtgtttctcggagagggggatttggcagggtcataggacaatagtggagggaaggtcggcagataaacagttgtgaacaagggtctctggttttcctaggcagaggatcctgcggccttctgcagtgtttgtgttcctgggtacttgagattggggagtggtgatgactcttaacgagcatgctgccttgaagcatctgtttaacaaagcgcatcttgcactgcccttaatccatttaaacctgagtggacacagcacatgtttcagagagcacggggttgggggtaaggttatagataacagcatcccaaggcagaagaatttttcttagtatagaacaaaatggagtctcctatgtctactactatctacacagacacagtaacaatcttatctttcttttccccacatttcccccttttctattcgacaaaactgccatcgtcatcatggcccgttctcagtgagctgttgggtacacctcccagacggggtggaggccaggcggaggcgcccccccacctcccagacggggcggctggccaggcgggggctgccccccacctcccttcctcctggacagggcagctggctggtcgggggctgccccccacctccctcccggacggggcagctgccgggcggagaccctcctcacttcccagacggggcagctgccaggcagaggggctcctcactttcccagacagggcagctgctgggcggaggggctcctcacttctcagacggggtggccaggcagagacgctcgtcacctcccagacggggtggtgttcaggcagagacactcctcagttcccagacggggtcacggccgggtagaggcgctcctcacatcctagacagggcagtggggcagaggcgctccccacatctcagacgatgggcggcaaggcagagacgctcctcacttcctagatgggatggcgccgggaagaggcgctcctcacttcccagactgggcggcagggcagaggcgctcctcacatcccagaccatgggcggccaggcagagacactcctcacttcctagatgggatggtggccgggaagaggcgctcctcacttcccagactgggcagccgggcagaggggctcctcgcatcccagatgatgggcggccaggcagagacgctcctcacttcccagacggggtggcggccgggcagaggctgcaatctcggcactttgggaggccaaggcaggcggctgggaggtggaggttgtagcaagcccaggtcacgccactgcactccagcctgggcaagattgagcactgcgtgagcgagactccgtctgcaatcccggcacctcgggaggccaaggcgggcagatcactcgcggtcaggagctggagaccagcccagccaacacggcgaaaccccgtctccaccaaaaaatacaaaaaccagtcaggcgtggtggcgcacgcctgcaatcccaggcactcggcagtctgaggcaggagaatgaggcagggaggttgcagtgagccgagatggcggcagtacagtccagcctcggctcggcatcagagggagaccatggaaagtgggagacgagggagaggctcagcatcagagggagaccgtggaaagtgggagacgagggagagcagcttcagttttttaataactgtaaaatgcactatattattagagatggatggagaagttaaagtatttccaaacatgccagaagaaggtaggttttggtaggttttaggaaaaaaaaagtctagtcttgtattcccttataaaaattcttatttttcttcccagagcctgggtagtaagtttctcagctcctttttctattgggtgatttcaaatggaattctaggccttagcatgaaaatactaccagggaaaagaaatagggaaaaaaacctctcttccattttggttacagaaaaaatgagttgttttcaaaagaaagtgtggtggattatactggtgaattacaaagatgttccataacctcagttcttctccttctcaggttgaagaatttgtgaccgtggataagttcgtttcctgttatgtgaacttggcagattaatgctaaatcctgtgggacagcatttagcaacacctaaaaaagtactcaattatgattttttgtgtactaaatgattatggaaatactaattctgtgtggaaagaacacactcaaagggctttttctattctttcaataacaacaatcaacacagaagacttttgtgaccaaaagcgtgggttttctccctaccaaaaggcaagcagtgtatcctgcagtggacagcaactgggtctcttccaattcagttttgacattctctaccctggagatagtttcagagcccataggttgatggctcagtccccacatccctccctccctgcctgccactccctaccattcaggtatcagtggtaagtctggaccaattataacccacaggtttcaagttggagttcttgtgctctctttgggtttaacttgctattgtggcttgcagaactcagggaaacacttactcatcttcacagtcttctttcatttctttttttgtagagatggagtctctctatgttgcccaggctgaactcctggcctcaagtgatcttcccatcttggtctcccaaagtgctgggattacaggtgtgagccaccatacctaactctcaggtttctttctttttattttttttttttgagacaagagtctcacactctgtggcccatgctggagtgcagtggtgcgatctcagctcgctgtaacctccactgcccggattcaagctattctcctgccttggcctcccgagtagctgggattataggtgcacaccaccacgcctggctaatttttgtatttttagtagagacggggcttcaccatgttggccaggctggtcacgagctcctgacctcaagtgatccacccaccttggccccccaaagtgctgggattacaggcacgagccactgcacccagccaaggatattttaaaggatacaaataaacatccaggtgaagagatacatagggtgaggtctagaagggtcttgagcacagtagcttctgtctctggggttagggtgtgccaccctcccagctgatggataagttcttgtttaccttcctataagcctgcatgtgttgagctgtctgggagctttctgaatcctgtactctggggccttttcttgagacctcattggataggcatgattcataactatgtagaaattagctggacaaaaaaggtagaatctaatactgatagactgaatgggaaaatccaccaagccctgtctgttcagattctttttggcttctctatgtagcattccttcctccagggtatgagacaggaccccttctgaaatgagcgtctgatgacccacaatcagaaaagctgggaagattagactccttccttgggcaggtgaaggacagcaggaggtcagtgagagaaattctgtcttctcagtcctgcctctgaagcctacagtgccacagcactataacaggggctgtgacagttacgagccaggaaaaatgcaaaaattagccaggtgtggtggcgcatgcctataaacccagctacccgggaggctgaggcgggagaagtgctggaaccaaggaggcggaggctgcagtgagccgagattgtgccactgcactccagcctgggtgacagtgtgacttggtcgaaattaaaaaaaaaaaagttccacatatccctagggcagaggcacactgcagccaagctctttgctaaggaaaaacaaaagtgacctgtgcttcagttcccaataaatacttataagtattgtcctttccatctgagacctcctcagcctgaactttatatcactatcagcattttggtcacaaccattcagcaagcctctacaaagtctcaaactccctcatcttcctgttgtcttctgagccctccacactcttccaaacctctgcctgttaagaagttccaaaaccaattccacattttcagatatcttgatagcaatgcgccacttctcagtaccaattttcttgtattattccattcttgcagcatgataaagaaatacctgagactgggtaatttataaagaaaagaggttgaattggcccatgattctgcagactgcacaggaagcatggtactggaaggatggcatctgctcagcttctagggaggcctcaggaaactgacaatcatggtggaaggcaaagggggagcagcagttcacacggccagagaaggagcaagagagagcagggcaaggtgccacagacttttaaatgaccggttctcacaagaacttaccatctcaagaacagcaccacagggatagtgctaaaccattcatgaaggaccaccatccagtcacctcccacaaggccccaccttcaatattgggaattacaattcgacatgagatttgggtggagattcaaatccaaaccatgtccttttgcttttttctgttttgtttgtggagtagatttttctccatccctttactttgagcctaagggtgccattgcatgtgagatgggtctcttgaagacagcataccattggatcttgcttttttatccaagtcaccactgtgccttttaattggggcatttagcctgcttacattcaaggttagtatttatatgtgtagatttgatcctatcatgttgttagctggttattatgcagacttgtttgtgtggttgttttatagtgtcactggtctatgtatttaagtgtgcttttgtggtggctggtaatggttttttctttccatatttagcactcccttcaggacctcttgtacagatgttctctttcattgtaatcacacaggatgggctatgtcacccaaataacatgtggtggtgattaacatgtgaaatgttacctgccagggtcacgcattacagactctgtgcccagagtattttttcatggctcttgttttctgttagttgtaatagaatacctgaaatttggctgggcgcggtggctcgtgcctgtaatcccaacactttgggaggctgaggcaggtggatcatttgagaccaggagtttgtgaccagctcagccaacatggtgaaaccccatctctactgaaatataaaaacaaagccgggcatggtcatgcatgcctgtaatcccagctacttgggaggctgaagcatgggaattacttgaactgggaggtcgaggctgcagtgagccaagattgccccccctgcattccagcctgtgcaacagagcaagactgtttccaaaaacaaaaaaaaacaaaaaaccctgaatttgggttaatatataaaaaatacttattttgtacaattctcaaagtttggaaatccaagggcaaatggggtacatctggtgaaagcttcttgctctttactgtctgaggcagtggagatcactaggcacgggggctgattgtgctaactctggtctctttctcttcttacaaggccacaagtcttatttgtaggataacccattcattcattacctcttcaattcgtcagtggattaatccattcatgaggcagagccctcatgcctcttaaagggccctgctttcagtactgacacattggggatcaaatttcgttatgagttttggaaggggaaattattcacacttagcaagggctgattaggtacactgcttctgctgaaaataccacactctcagagggaaaatgggaattaggcaaataccatattgtttgcataagtagttaaggcacacacaaccccatttattagttatgttggtgcagatcttcccaaatctagcccctagataccatcaaagttcaactttctaaataaacgtgtaagaatatgcagtctcagaactgctaatttgtctcttatagacagtatgtttgggactttctcatgagaggtaatactgacccactatacagagagacactagaggtgatccaggcagcatatctcagtctctgaaatcaccaatgagaggcatgtccttgttggctgtcactttactgaatatattcaattctagcatcagaattgctgtgatggagaaagtgagtgtagacagaagacaagaggctgaccaagtcattgaataaatttttggagtccacagcatcgtgtgaacttctgaagtgagtatagattcctaatgctgttggtctgaaccttcctcctctgccatgtgggatgtttcaggactcagtgacctttgaggatgtggctgtgaacttcacccaggaggagtgggctttgctgggtccttcccagaagaatctctacagagatgtgatgtgggaaaccttcaggaacctgatgtctgtaggtaagggtgacatcatttcttcacttagtcaattatagaacaagtgtttcttggtcttctgcattgctcaatgatttggaacatggtagggaatacagcagacccttgaacaaggtgggggttagagactctgatcgtccacacagtctgttaggtgcctgtgaatttagagtccctaaagagttaactactaatagactgctgttgaccaaagctgtattgataacagaaagtcaattaatacattttgtatgtttggtatatatctatatacatatatatggccaggtgtgggggctcacacctgtaattccagtactttgggaggctgaagtgggaggattgcttgagctcaggattttgagactggctgtagcaatgaagtgataccctgtctgtataaaaaataaaaaaagtagccatggatggtggcacacctgtgttcctagctattcagaaggttgaggcagtaggttcgcttgaactggggaggttgagcttgcagtgaaccatgattgcaccactacagtttagcctgggcaacagagtgagtccttgtctcactctgtgtgtggctgggcatggtgacttgcgcctgtaatcccatcactttagaaggctgaggcaggtgcatcacttgatgtcaggagtttgagaccagcctggccaacgtggtgaaaccccatctctactaaaaatacaaaaattagcttggtgtggtggcatgcacctgtaatcccagctacctgggagggtaagggaggagaatcacttgaacctgggaggcagaggttgcagtgagccaagaccacgccactgcactctagcctgggcaagagagagagactccgtctcaaaaaaaaaaaaagtgcgtatgtgtatatatgtttaagacagggtcccttgctaggtctagaggcgagtgccaccatccccagctaatttttgtataatttttttgtaaggtggagggtcgtgaactcctggcctcaagcattcctcctccctagcatcccaaagtgcagggattacaggcatgagccaccatgccaagcctgtttggtatgttatgtactgtattcttataatacagtaagcttttcttttgaaaaggttatcaaaaaaattagaagagaagatatgttgactttagtaagtgcaagtagattatcaaggtgttcttccttggttgtcttcatattgagtaacctgagcaaaaaaggagggtttggtcttgctctcttagagatggcaagagctgatgaaaatgtgcatgagtgaactgtgcagttcaaaaccatgttggtcaaggttcaactgaactttggtgaataaatcagccatggccacagtgtcccatgaacatagaatctaataatttttctataattttgtaataacttatgatgacttttatgggtctgcattttaggaataaaatgtgaagaccagatcattgaagatcagtacaataattccaaaagaaatctaaggtcatttgcacttacaacctagagctatgtcccttaagatattgttagaatgacaacaaatgttaaaagcaagcaaagaaaatgaagcagcccagcttcaaattcattcatttttagaaaaaattttccaggctgggcatggtggctcacacctgtaatcccagcactttgggaggtcaagggaggcagattgcttgagcccaggagttcaagaccagcctgggcaacatggtgaaactccatctgtacaaaaatctaaaagttagccaggcatggtggcatgcacctgaggtcccagctactagggaggttaaggtgggaggatggcttgaacccaggaggtcaaggctgtgatgaatcgtgaacatgccactgtacttcagcctgggtgacagagtgagaccttgtctccaaaaaaaaaaataactattttccaaaaacaatatacttacacaagacataaatatccagtgttttcaaaatagttgccttggagccagtgttaagaaattgattatgaatatcaatgttttgataataagtgtaatgcagcccttttgcagagtattcagtccattgatgtttacacagttcagacaagccagaaaacctactttccatcataatgcaaaatatgtaaatcaaatacctactaatgaatataaaatcatttataaaccagcccttggtattgtgcttatttctcacagaagtcatatggtagagagagtctgaaggtaaggaagatggtcaatgtgaagagatcttcagccttgttccaaatggtatagtgaagacgacttttactggagtcaaatcatgtgaaagcagtgtgtgtgaagaaggcaatatggatcattcatctcttaattgctgcatcagagctgacactggacacaaatcagatgagtgtcagcaacatagaagccacataagcagtgtgtgaaaaccttcagctattgccactcctttcaaacacatgaaaggcctcacactggaaagaaactccatgtaagaaatgtggaaaaaccttcatttctgttcaaaccttttgaagatacatggtaatgcacagtgaagatgaaccttataaatgtaagttttgtgggaaggcctttgataatctacatttatatcttacacatgaaagaactcacactggagagaaaccctatgaatgtaataaatgtgggaaagccttcagttgttccagttccattcgaaaacatgcaagaattcacactggagagaaaccctatatatgtaaacaatgtggcaaagcctttagatattccagttctattcgaaatcatgaaaacactcacactggtgaaaaaccctgtgaatgtaagcaatgtgggaaagcctttagttattccagttactttcgaatacatgaaagaattcacactggagagcaggtgtataaatgtaaggaatgtgggaaaacattcacttatcccagtgcctttcataaacataaaagtacccacacttcacagaaactttatgaatgtaaggaatgtgggaaagcatttgattgttttagttcctttcatagtcatgaaggggttcacactggagagaaaccctatgaatgcagaacgtggaaaagccttcagtagttctaagtacttaaaaatacatggaagaactcacactggagagaagtcctatgcagtaaagaatgagggaaagtattttattgtctcagtccccttcaaagacatgaaaggactcacatcagagaaaagttgtatgaatgtaaaaaatgtgataaagccttccattcgtccagtactgttagaaaccatgaaagaagtcacatttaagaaaaacacagtgatgttaggaatatggggaacctttcctttctcttccagtctttggaaggcacagggtatgacacactggtgaccttataactgtaaggagtgtggataagtatttattagtccttgtgtgttttagatacatgaaagaatttactcaaaaggaaactctatgaatgtaaagaatgtggtaaaacctgtgtagtttcagtttctcttgaataaagtcatttcctggtattctcaggggattggttccagcaccccttgagaatatataattttgctcaagtgctttacagaaaagtgtatttgcctataactaggcaatcctgtatactttaaatcatctctagattacttataatacctaatgcattgtaaatgctatgaagacaactgttttattgtatttagggaagtatgacaagaaaaaacatctgtacatattcagtacagacacaaccaccatacggctacctacctagtacacatcatctacaatataacattttctttttaaaaaacagttatggattggtttcattaaatgacctgcaagcgtgtgttaaccttctgtaaaaccctggttattttctcctggtagcccacacatgatgatgatgaggatgatggtgattgctctgtggtgcctaaagttgcaacatgttgaggtgccaagatatgtggcagtgtcgataagcaatgagatgtcaattaaactagaatcatctgacaggacattagaagtatcatctatgttggaggtaccaacttctgactgcagatgttgactctttcatcaataatacaaatgttggatctacggaatttgagggtcaaagatatttaagcattgatggtcccacagattctagttggggacattatcaaggatgcagtttacccagagcgattaaccctagtggaggagctagattaggaaagtttctggggtcatggttaagtctaggttctacttggaatggatatctaaccagaaatctttcttgtatcattagtagagttgcccatttcaccaccgaagccatcaggacacaagagaagtctctaggttcccttgcctgcatggccctagacaaccacattgcagctatctccctactttacagggtagtgtctgtgctaacccttgcttctgcatctgggtaaaatacttccagtcagactgaattgggaacatataagatcttaaaaccagccaaatctctgaaagggacaccttcagaaaccctcctgtctagacttactgggttacatttccaatttccagatattttcagctggctcttcccctggtataggatttcttctccattctgccctacaagtctcaatgatcctatttaaaatatgcatttggctcctctttaaaattgttctatcttgtttcaacagatgcctccaagagacccccactaggttcttgctgacctaatacttgagattttaaactcactccagctggccactgaaaccaacttaacccaagagattttggctaaaatttaacaggttcctgagaacctcttataagtaaatggctatagttgcccaactggccactgccctgccattaggatccctgcatgggatggacccacagcaggtcactggtaccatgatagaacacacacaaaaacttatgaatgctgtctgtggacgggttagagtcagtccttcacactggctaactgggcctaagttttaaaaagagctaagccgccacttgttaactaggggtcacaagcactgtgagtttcctgaaaaccaacacctttttaactttgggggctcacctgagctagtcaatcagagctcagctgtatcaaccaatcagaactgagtttcaagtttcagatcttcatttgcataaaagcacttgactaggaacccagatgggaacttttgctataaaacctaagctttcccttgttctctggaacaaataatgtttaggttgcaaactccttatgccttttccccagaactatgtagaaataacgccttctaaaatgtgatcttgataccagggaactcctttttttttttttttttttttttttttttgagtcggagtcttgctctgttgcccaggctggagtgcagtggcgtgatctcagctcactgcaagctccgcctcccaagtggctgagagacaggtgcgcaccaccacgcccagctaattttttgtcatttagtagagatggggtttcaccctgttggccaagatggtctcaatcgacctgaccttgtgatctacgtgcctcggcctcccaaagtgctgggattacaggcgtgagccaccgcacctggctgataccagggaactcccagagcaaagcactaaatactttcattcctctaaggtctatgactctaatcagcagaaagtagttagagcagttatcattccttttccttcaagacttaggaatgaacataataggagggatttgtaaccacaacagattatgtggtacaacttctatataacaaagctgagttttcagttgccatggacccaacactcaaggtcacataatctgagcatgcccagatgaaccaaatgtgtaaccatgggtggaacctatatgcttggactgaggtgtggagattaaagtaaaaagtagatgctgggcacggtgactcatgcctgtaatcccagcactttgggaggctgaggtgggtggattgcctgagctcaagagttcaagaccacccagagcaacatggtaaaaccctgtctctgtgaaagatacaaaatattaaccaggtgtggtggcgcacacctgtagtcccagctacttgggaggctgaggcagaattgcttgagctccagaggtgaaggttgcagtgagcgagatcatgccactgcattccagcttgggctacagagtgaggctctgtctcaaaaaaaaaaaaaaaaaaaagataccacatggtggaatctaggatctaatcaggttgggccccggtatcatcccatggcaggatccaatcgagtcacattaacctggcatgagatcattgcaagatgcagtgagttcatgtcttattaccccacgcttataaaacttgccaaagcccccagctcagggagacatatttgagcatttcttcctttctccttgccagtcaaacttgtagtaaagcttttctttcttcaaaagctggtgccatgctattggcttgtgtgtacatctggaagtgagccaattcactacttgctaacataacaaagaatcagcaactgtgaagatgaaacaattaaaattatccagtctgggccaggcgcggtggctcacacctgtaatcccagcactttgggaggtccaggtgggtggatcacctgaggtcgggagttcgagaccagcctgaccaacatggagaaaccctgtctctactaaaaatacagaattagctgggtgtggtggtgcatgcctgtaatcccagttacttgggaggctgaggtagaagaatagcttgaaccaaggaggtggaggtagcagtgaaccgagattacgccattgcacaccagcctgggcaacgagagtgaaactccatctcaaaaaaaaaaaaaaaaaaaaagaaagaaaaaaattaccagtctgtggaaaagaaagaggaaagaaattgagagaatgtgttactagtatacctgccttgccagtcatgttaaagttcttcagagcgaaggaaactgatacaggttaggaaagcagatgtttcagaaataaaacttgttagaaaataattaaatgagggcacaaatatgattatcttttcttctccttcatagataaatgtttgttcaaatgaatatcaacaatgtattgggtggttatagcttctaacaggtcaaatgcgtgacagtgatattatatgggattggaaagaggaattcagaacactcttaacatattggcactaccccagacaccagtatagtgttatttgaaaatgaaagtccattagttgcaaatgtatactgcaaactatggaattcactaataaaatttaagaaacaagtagacttactacactaatagaagcaagcaaatggaatcatatagaacgctcaattaaaaggcagaaaaatagagcaagtagaaaaaaagcacaagtacaacaaacaatatatatgaacatattaatctatgtcaattaccactttgaatgtgtatttttttttttttttgagatggagtctcgctccatcgcccaggctggagtgcagtggtgccatctcggctcactgcaagctccgcctcccgggttcacgccattctcctgcctcagcctcccgagtagctgggactacaggtgcccaccaacacgcctggctaattttttatatttttagtagagacggggtttcaccatgctagccaggatggtctcaatctcctgacctcgtgattcatctcaggaagacaagatgggtggatcacttgagcccaggagttctcaagaccagctgagcaacatggagagaccctgtctctacaaaaaataaatacaaaaattagccaggcatggtagcacacgcctgtagtcccagatgaggtgggaggattgcttgagttcgggaggcacaggttgctgtgatcacaccactgcaccccagcctgggtgccagagaccctgtctcgaaaaataaataaataaataaataaaccaaaaaacctgatttatctgaatttaatatagccgttccatacttttgagtagggctagaatggcatatatttcaccatacctttctatttaaggtatctgtgtctttctgttgaaaatggttatcttttacacattgctgggccttgtttttaattctactctgccagtgcctgtcttttttactggtgtatatagataatacacattcaggccgggcgcggcggctcatgcctgtaatcccagcactttgggaggccgaggtgggtggatcaactgagatcaagagtttgagaccagcctaaccaacatggtgaaaccctgtctctactaaaaatacaaaaattagccgggtgtggtggcatgcacctgtagtcccagctactcaggaggctgaaacaggagaccatggaatattcaccaaggcagaccacatagcataaaacataccttaacaaatttaaaaaaatcaaattccataaaatacgaaatcaaaccgtattagcattaaactagagatcaatagcagaagcatagtttaaaagcctccagaaagtaaagatttaaaccacaaacttctaaactatgcaacagacagaattctccagagatacttaaatattccaaaaattgaaaaaaacttttagcaaaatttgtagaatacagcaaaggcagtgcttagagagctatttaaataattaaatgcaaactcttgaaagtaaagatctaaaaaacaatgctgtaaattccaccccaggaaactagagaaagaagagcacgataaatgtaaattaaggagaggaaaacaacgagagaagatattaatgaaattgcaaacaggaaatcaatggaaaacatcaacaaatccaaatcctggttttctgaaatgaataaaattgataaacacccatgctaactcacaaaagggtgggcatctctaagatttccatgaacattaaaagaaccataaaggaatattaactccatgcccatagatctgataaattacaagatgaggccgggcgcggggtggctcacgcctgtaatctcagcaccttgggaggccgaggcgggcggatcacgaggtcaggagatcaagaccatcctggctaacacagtgaaaccctgtctctactaaaaaaaatacaaaaaattatccgggcgtggtggctggcacctgtagtcccagctactcgggaggctgaggcaggagaatggcgtgaacctgggaggcgcagcttgcagtgagccaagatggcgccactgcactccagcctgggcgacagagcgagactccgtctcaaaaaaaaaaaaaaagtaaatctgagatgagttacagatgtcttcaaggtgacaaatccatggaggtgcagtgctgactgaaaacagacaagtctgactcaagtatcaggtcaggttctcctatcatctgagacataccccttcccatgctgctcactgaagtgctgagtgaccgccctcccaggagacactgcactgtgtgcttttgaggttcttgtaccacatcattggggggtgggttttcctttccttagggttagtttttacccttcactatgtggcaggccagagtctcactaacacaggcttccataacaactgtttcagcactgagtggttaaatattaaaagtcgagagagccgatgcctctaaacaaaggctggaatgtaacaaaagcccaacaagagttttgcccaggcctttcctgggccttgaagcatgacaagataacgaaggaattccttttttttttttttttttttttttttggagacggagtcttgctctgggactataagtgcatgccaccatgcccagctaattttcgtatttttagtagagatggggtttcaccatattggcaaggctggccttgaattcctgacctcaggtgatccacccaaagtgctggtattacaggcgtgagccaccgcgcctggcccagaaaacagcgttttgattgaatactatgacttaagaaatgtacacaaacactcgattctaatgggtatttttccctagaagggtatggattagcaattctgaaactattttacatgttagaatatatgttgttatgttatctacaatatatgttgtagataattagtgcctgtttctcactggagttgaaaaaagtaaaagaaataaagggacactgctagaatgaacccagtggtgctagaaatacagcaccagggaaaaagaatgtttaatgttgctgtgaactgaggagatgaaatcagagtcacaaaatgcagggaaagagcttaaaaaccaagggattttaagccctcggaggagttagttgagggaagagagtggtggattagaaaccctgattcccaaacctttggaagatgcagagggataccacttgccatttaggaatgtgaactcaaaagtatctgagacatgtttcaatttagaaagtttattggctgggcgtggtggcttacgcctgtaatcccagcactttgggaggcagaggcaggtggatcacctgaggcccagagttcgagaccagcctgaccaacagggagaaaccccgtctctactaaaaatacaaaattagccaggcgtggtggtgcatgcctgtaatcccagctactcgggaggctgaggcaggagaatcacttgaacccgggaggcagaggttgtaccgagccaagatggcaccactgcactctagcctgggcaagaagagtgaaactccatctcagaaaaaaaagtttattttgccaaggttaaggacacatccatgatacagcctcaggaggtcctgaccacatgtgtccaaggtggttggggtacagcttgcttttatattaatacattttggggagacataatacatcagtcaatacatgtaagaggtacattggttctacttggaaaggagggacaacacaaagtgggcgggggaggggtctggttcccaggtcacaggtggattttcccataaatggttgtggagaccaaagtttcataatgcagatgaagcctccaggtggcaggcttcagagagaatagattgtaaatgcttcttatcagacttaagttctgtgttgatgttaatactgataggcttttcctgggttccaaaagggaggcaaatataatggggcacgtccagctgatacagtttgactgtgtccccatctaaattgcatctggtattgtaatcctttcgatttaggctattgcgccacagagcctgcttgcaggaattgtaatcctatttgtaatccccatatgttgagggagggacctgctgggaggtgattggatcatgggggtggtttcccccatgctgttctcctgatacagtgttctcacgagatctggttactggataagtgtctgggctcctcccttctctctctccctctcctcccttctctctctccctcctgccaccccgtaagacgtgccttgcttccccttctgccatgattgtaagtttcctaaggccatgtggaacagtgagtcaattaaaaactttttttaaaaataaattacccagtctcaggtagtatctttccagcagtgtgagaacagacgaatacacagaccacccttccatgatggcctgaacaagtttttcaggttaattttgtagtgccttcgccgggaggagggatctgttcaaaatgactggggggcttagaattttatatttggtttaaaaaaggaataaaggaataaagaaggaactggggaccccggaccgtagctccttccacgcatgaaccccgcacacgagtcgggattccccccatgaccctcccgtggcccccgcacaatctggagagacgcggggctgcgggcgcggagctgcccagagaggactcctgcccgggcccgcagtcgccgcgaagggacgggacaggacgcccggggtcccggctgccagcccagccccaccctgcggccgaggggaccgagggccgagctccgccagcggtactccggtccacagagcccggagtcgctggctgggaggccggggacccgccacggccagttccaaccagcccctcctcccgtctcgggatccctggcccctcacgctcaccattttccgaattcctccgtgtcccgggggcctctctgcggctcccacgaccagtgcaggtccctgtgtgacagaggctgccgcagactctccagagtgcctctcagcgacagagacaggagcccagcgaagtggcgtgtagaagacgccgcgggctttttcaatctcgcaccctcttagctgaagtgcgcctgattgacagttcccacgaccccgccccacggccctgattggatagtgcgacagatcccgccccctgacgactgagttacagaagcgatctcacgctggggagtggagactgatgaacgagttcttgacacagcccttggcagggcgggcttcttccctgcgctgtgacctgacccctcccaggggacatctgcatttaagcaggatcccccatctgtactcagtgtgaccttcctgctttttcctcctagactggggatcacaagtgtgtgcagggaaacccagacacattgtccagtggagccattccctggcctcggagtaggaggagagccgaggccatacgggccacactgcaacaagaataagggcttaggctgggcgtgatagctcatagccgtaatcctaacactttgggaggccgaggccggtgcattgcttgagcccaggagttcgagaccatcctggacaacatagtgagagcctgtctctacaaaaaaatacaaaaattagcctggaatggtggcctgtacctgtagtcctagctactcggaaggctgaggtgggaggatcacttgagcctgggaggtcaaggctgcagtgagtcaagatcgtgccactgcactccagcctgggcgacagagtgagacaccatctcaaaaaaaaaaaaaaaaaaaaaaaaaaaataagggcccgatgtgttccagggatcaggaattttggataagtctgttggctgcatggccaagcctttctcccaccttatctctcaatctactgattttcagccaaggaagtaataacatgccaacaacggaataaaatcattaaatgtatggaaaaagtggaatcacatagtagcaatattttataaggaaatcgaaagacaagaaaagcaaacactcgaactagttgagataagtagcctgctgcacccacagttcacaaacctgcagtcagaaggtgatacacgttcccaagcttgtgagtcaaactctgatgaggcaggggcacttaaagatttaactctgggaactcaacgtggcctcctactccttctccagagtgtggaaatgctccttccttcaagaccttcattttctttctttctttttctttttttttttttttttgagacggagtctctctctgtcgcccaggctggagtgtagtggcgtgatcttggctcgcaaccttcgcctcccgggttcaagcgatcctcctaccttagccacccaaggagctgggactacaggcatgtgctaccacgcccagctaatttttttttttgagacacagtctcgctctgttgcccaggctggaatgcagtggcacgatctcggctcactgcaacctccgcctcccaggctcaagcaattctcctgcctcagcctcccgagtagctgggactacaggcgcacgccgccatgtccggctaattttttgtattttagtagagacgggatttcaccgtgttgcccaggctggtcgcgaactcctgagctcaggcaatttgcccaccttggcctccgaaagtgatgagattacaggtgtgagccactgcactcggcccactaatttttatatttttagagagacgaggttttaccatgttggccaggctggtcttgaattcctgacatcgggtgatccacccacctcagcctctcaaaatgttgggattacaggtgtgaaccaccgtgccggccaagaccttcctttttgccagcaggaaactctcatctaaaaatcagtttaatgcattgacctatataaactgtcaaattcataactccttttccagaaggcaatctaatgagtctttaagtctgaccttcacagattttcctcctatatacaaatgacagcctgcctcctgtgactctgtgcatgcccaaggcaaagcacttgaatgtactgagatcttcaatatttacaaaagaagatggtcagattaaaatattctgtctatgccctcaatgagcaggtagtataacaggttagagaggacaaaatcaaataaaatggacatggaacttacccatgatatcacagtctatcctggaggatttttgtggttgttttgttttgttttggagacagggtctctgtgtcaccaaggctggagggcagtgagtggtgtgatcccagctcactgcagcctcaagctcctgggttcaagccatcctcccacctcagcctcccaaggagctggaactgcaggcgtgcaccaccagcttggctaatttaaaaaaattttttgaggtagacacggcgtggcggggggatgggggagtctcaccatgttgcccaggctggtcttgaacccctgggctcaagcaaccctcccccctcagccttccacagtgctgggaatacaggtgtgagccaccgtgcctggcgatggtttctaaaaagcactttgcttcaaaggatttagagagccacaggtgggttcatctggggccagttagactgcttgaaaaggaaagctatttatgcaatctgcagctgcctaggaaatggccccaaagttcccagagttacagtctcaaaaaggacgcaaccccctagctgcatctacatgtgggtttcccgctttccagggcactgcagcttctcagaatccacagtccttagctgttctgagcagctggaggccatccgcaagggtaggcaggatgcccagctccattctcctccctttgtaggcttaagactggtgtcagcttaaagtcactgtcctcaggctctgctgcccactccaggtttttagggctccgaaaacaatgatcctcaaaacaggtctcagaagcagaagtttttctctgaccttctcttgccctcctgtctctcagtcccattctccaccaagggtagccatagaagctagaatccctcttccccaaggcaggtcatagaatccagaacccctattccccaagggcagccataaaatgcaaacagataactttccctgtgccttcctttggaaaaactggtcacaaagaatttatctgacctaccttatttgactgtaggtcataagactgtcatttaagagaggattctggccaggtgcggtggctcacacctgtaatcccagcactttgggaggccaagacaggtggatcacgaggtcaggagatcaagaccatctggccaacatggtgaaaccccgtctctactaaaatacaaaaaattagctgggcatggtggcacgcgcctgtagtcccagctactcgggaggctgaggcaggggaatggcttgaacccaggaagcggaggttgcagtgggccgagatcgcgccactgcactccagcctggagacagagtaagactccgtctcaaaaaaaaaaaaaaaagattctgtctcatacctagaaggaaggaatgctactcagagagaccaagaaaaatctagacagacaggccttctgggtttcctcactcagtctgttagcattcaatcataccttttttgttcaatcaggtttcttcatagctgttcacacattgttaaacccaagcacaaaaatgtacaacttaccctgtatctctgagtcttcattctgaaggctcctgtgtatatacattaaataaaatgtgtatgccttttctccaattaatcagtcttttgtgagttgatttttcagtgcaacatgagagggtaaaggagaactttccccatggcccctacaaggttattcacctgcctttcactgataagttaaatgagacaaagaccctcaatcccactgtttgaataagaagccagcagactcctgggttttctcctatgtttatatataaagtagaggaagaaaattctaagatattttatatgggttaaaaaaaaaaaaaagcctggagtccgggtgcggtggctcacgcctgtaattccagtactttgggaggctgaggcgggcggatcacaaggtcaggagatcaagaccatcctggctaacacggtgaaaccccgtctctactaaaaatacaaaaaattagccgggcgtggtggcgggcgcctgtagtcccagctacttgggagactgaggcaggagaatggcgtgaacctgggaggcgcagcttgctgagatcgcgccactgcactccagcctgggcgacagagtgagactctgtctcaaacaaaacaaaacaaaaaaaccctgaaaatggttggctatggtggttcaagcctgtcatcccagcactttgggaggcagatcacttgaggctaggagttcaagactagcctggccaacatagtgaaaccttatttctactaaaaatacaaaattagccgggcatggtggcccatgtctgtagtcccagctactcgggaggctgaggcatgaggattgcttgaacccaagaggcggaggttgcagtgagccaagattgtgccactacactccagcctgggtgacagagccagactctgtctcgaaaaaaagaaaaaaaattaaaaaccacctggatataattattcctttgagaaaacaaactgttattttcctcctaacagttgtataaaacaactaatcaggctgggcacggtggctcacgcctgtaatcccagcactttgggaggccaaggtgggcagatcacttgaggtcaggagttcaagaccagtctggtcaacatggtgaaaccccatctgtactaaaaatacaaaaattagcagggtgtggtcgtgcatgcctgtaatcccagctgcttgggaggctaaggcacgagaatcacttgaacctggggaggtggaggttgtagtgagccgagattgagccactgcaccccagcctgggtgaaagagcgaggctctgtcacaaaacaaaaaaaacaaaaacacacacacgcacacgcacacactaatcaaaagtgaactctcccctttttcctctgtttcagcagctccccaaccttcacagttcatggttgtcatcacgtgctctgtacctggtaatggacatgttcagtttacccatctgaaactctcaaccccactccatcaccactgacccatccaatcatttctgcagctaaattctaagcattgtataaatacctcttccctttcagcagtccagctggcccaggttgaatccacctgtggctctctcatttccctcaatttcaattattcatttgaaactatcttccaggatcgactgtgatatcttgtatgatgaccacattccctttatttgcttctgttcttcctaacccatgtcgccacctgttcattgagggcacagacagaatattctaagctgactatcacctgctgtaaattctggagtctcagcacaacctggagaaatccacagcccagagaggatgttaatgccatccttaccacaagagggagcttcttattttcacttctggaaaatggctaaaaacagaattttggagttttacatagcacaatatagatgatagaagtaaaggtaacaccattcaattttgtttcattttctttctttttttttttctttgagacagggtctcactctattgcccaggcaggagtgcattgtcacgatcacagctcactgcagcctcaacctcctgggctccagtgatgctcctgcctcaacctccagttagctgggaccacgggtgtgtaccaccatgcctggcttattttttaaaaagttatttgtagaggtaggggtctcactatgttgcccaggtggtcttgaactctgggctcaagtggtcctcttgcctcggcctcccaaagtgttaggattacaggtgtgagccactgtggccaacctggtttcatttttatgatttaacttttcctaggttaaaaaagcaaataagtccatgcacagtggctcacctctgtaatcctagcacttcgggaggtcgaggctggaggatcacttgagccaaggagtttgagaccagcctggagcctgggcaacctagtgacaccctgtctccaccaaagaaagaaagaaagagaaagagagagagggagagcaaaaaagtctgtgaatcttaactgaatttctctgaatatgagaagtgcaaggaaatatctctacaaacggaaagatgtaggagtaactgaggtggtacaaaggattctctctgagatggtgacatttactgtgagacctgaaataatatattagggcagtaaaacgttagggcagaggattcagggaagatggcagagtagcaagcataaaaaagctttctcaggccgggcgcagtggctcacgcttgtaatcccagcactttgggagactgaggcgggcagatcatgaggtcaggagtttgagaccagcctgaccagcatggtgaaactccgtctctactaaaaatacaaaatttagctgggcatggtggcctgcacctgtaatcccagctacttgggaggctgaggcaggagaatcgcttgaacccgggtgtcagaggttgcagtgagcagagattgcaccactgcactccagccgacagagcgagactccatctaaaaacaaaagcaaaaacaaaaacaaaaacaaaaccaagctgtctcagccgggtgtggtggctcacagctataatcccagcactttgggaggctgaggtgggcagatcacccggggtcgggaattcgagaccagcctgaccaatgtggagaaacctcatctctactaaaaatacaaaattagccgggtgcggtggtgcatgcctgtaatcccagctacttgggaggctgaggcaggagaatcgcttgaacccgggaggcagaggttgcggtgagccgagatcgcaccattgcactccagcctgggcaacaagagcgaaactctgtcttaaaaaaaaaaaaaaagctgtctccccacctagacaaccactggactgacagaatcatctgatgtagcaatgttataactgtggaggctattgaagctttgcaacttccataaaaaggattagacagtaaactatggctaattgtggtcattttatcacttagcacaatacaagctatcatccccacccttacccctgttgcaggcagctgcacatggagtgttttcctctaatttggcctcgggatctctctcagaagcgtggctataaactttagtgctggccaggcggggtagctcatgcctgtaatcccagcactttgggaggccgaggcgggcggatcacaaggtcaggagatcaagaccatcctggctaacctggtgaaacccagtctctactaaaaaaaatacaaaaaattagccaggcatggtggcgggcgcctgtagtcccagctactcaggaagctgaggcaggagaatggcgtgaacccgggaggcagagcttgcagtgagccgagattgcaccactgcacaccagcctgggccactgagtgagactctgtctcaaaaaaagcaaaaacaaaaacaaacaaaaagaactttagtgctgcattgacggggctccaggacacttggttgtggatatttacagtgtgactttcatggggtctaatatttaagtgttaacccataaccaaatgtccttcacaggaaacttgattatactggcagatgcccttatggttctacctctgccaagttaatctctaccaagatagccagatacccactctctacagagccctgacctggtaataagctagacataggtgtggcagtcaggtgagacgtgtgagacagcatcaggcaggccaatatatgcactgtgggagtttcagaaggagaagagacagagaaaggtcaggggagactatttggagaaataatagctgcaaatattccaaattagataaaagccatgaatgaatgctgtcatccaagaagctcaatgaactccaggtaggatgaatgcaaagagaaggacatgaagacatattatactcaaattgtcaaagccaaacataaagggagaaccttgaaggcagcaagaaagaagtgaatcatcacatataaatgatctttcataagatcatcagcagatttctcatcagaagcgctgaaggccagaggtagtgggctgatgtattcaaggtacttaaaaaaaaatggccacggtggcacatccctgcagtcccagctattccggagtctgaagtgggaggatcagttaaggcccaagagttcaaggccagcctaggtaacatggcaagactccatctcagaaacaaagacagccaagaatccaatatctggcaacattgtctttcaaaagtgaggaggaaattaaggcatgctcacatgaacaaaaactgaggtagttttgttctttttgtttttgccattagatgtaccctgtgagaaacgcaaaagccttctacaggttgaaatagaacactggacaatatctggaaggcgtaagcccaaataaagatctcagtagaaacaaatgcatggacaattataaatgctaatattattgtacaataattgtgaactccagtttttgtctttacataattgaagatacaaatccattaaaaattattagtctaaaagctagcattttagacttggcttttgaactctatattttgtttttttacacagtttaagagactaataaaaaagaaactaggttgggcgtggtggctcacgcctgcaatcccaacactttgggaggctgaggcaggcagatcacgaggtcaagagattgagtccatccttaccaacatggagaaatcccatctctactaaaaaaagaaatacaaaaattagttgggcgtggtggcgcacgcctgtaatctcagttacttgggaggctgaggcagtagaatcacttgaacccaggaggcggaggttgcagtgagccgagattgcaccactgcactgcagcctggagacagagagagactccgtctcaaaaaaaaaaaaaaagaaagaaagaaacgaatgcaccgaaaatatgtttgcgtttttgaatacataaagtataaagatgtaaatttatgacaccaaactgaaaggggtgtgaacaggcatgccatggagcattgtatttgcatgctatttatgttaaattggcataaatttagaatgttatggccttaggatggtaaacgcaatccccatggtaattaacagagcagtagtgtatacacaaaaggaaacaataaagaaatttaaatgtttcactacaaaaagcaattaaaagcaaaataatgcagaaatgcatgaaatgagaagaaaaaagctacaaggcatattgaaaacaaataggaaaatgacaaaaccaagtcctttcttatcaggaattactttatctatttattcattttgagacacagtgttgctctgtcgtccaggctggagtgcagtggtacgatctcggctcactgcaacctctgcctcctaggttcaagtgattctcatacctccaaagtagctgggattacaggcatgcaattctcctgcctcagcctcccaagtagctgggattacaggcatgcgtcaccacacccggctaatttatttctatttttagtagagacagggtttcactgtgttggccaggctggtctggaactcctggcctcaagggatctgctcacttcggcttccccaagtgctgggattacaggcgtgagccgcagcgcctggcaatgtgagttaattttagtgtataatgtgagaaaggttctcagttcatctttctgcaggtcaatatcccattttcccagcacattgttgaaaacccattccctatgaaagcatcttggcccatttgttgaaaatcaatgagccataaacaaagagtgtcttagtccatttgtgctgctatcgtggaataccacagactgggtaatttataaagaatagaaattgactttctcacagttcagaaggcttagaaatccaagaagacactggcatctggcttcagcattgctgcattctcacagggtggaagacaggagggcaagagagggcaaattgcattcatcaaaccctgtataatgccattaatctattcacgagggcagagtcctcatgatctaatcaccaaaaggcccctcctcccaatagtgttgcagtgggaattaagttctgacttataaattttagagagtacacaaatatttaaaccatagctaagggactctcaattctgccctgctggtctatatagctgacaatttgccagtaagtctggttactttactacccaccctgatgctgaagcatcccattccgtcccacatgatagtcatgcaggcatagaaatggttctaaagccgcaagagcatcccttagacaacctagatgtacttctattttaggatacatcctgtaaaagaaattttctgaagaacataataatgggtcatgccatggttgctccacatgaaacgctcggggcactgtcttcactcactgtaaaatcagcccaaggactgaactcatagctcttaggaaagcttgcacattggcaaacaagaaaactgacacagagagtaagcttccacacccacaatctcagctactcaggaggctgaggcaaggggattcttgaggccaggagtttgaggccagtttgaaccacacagccagattccacctcaaaaagaaaaaagaaaaagaaaacggctacaatttacacggataccagatacgctttgggagtctttcatgcagtggacacagtctcaaaacctggaggatttacaacttgttctggttacttattacctatcatctattaccaatggacatgtaatacatgcactattacaggctattcatctccctcccaaagtggctactgttcactgttcagtccatattaaggagacttatcctatgtctttcaggaatgatagggcttaaatactgttaaatagaaagacagacatgtacccctttatcctttctccccccaatttataagcctgccttttttttttttttttttttgaggtggggtcttgctctgtcacccaggctgcagggcagtggcatgatcacagctcagtgcagcctcaaccttccaggctcaagtgatcctccaacttcagcctccaaagtagctgagatcacagacatgtgccaccatgcccaaataatttacttttttatttttatttatttatttatttatttttatttttattttttttgagacagagtctcgctctgtcgcccaggctggagtgcagtggcgcgatctcggctcactacaagctccgcctcccgggttcacgccattctcctgcctcagcctccagagtagctgggactacaggcgcccaccaccacgcctggctaattgtttgtatttttagtagagatggggtttcaccgtgttagccagtatggtctcgatctcctgacctcgtgatctgcccaccttggcctcccaaagtgctgggattacaggcgtgagccaccgcggccggccatttttttattttttgtaaaggctgtctttaactctggttgatattactatcaggtaaatgtcccataatctgaaggagaccaatagatacaaaagagagacaaacaattgttggagagattatatatgcctcatgattagtaattatagtaacttgttaacaattgtcattgttaatgaaaatcagattataccaaacatactccttgtagcccctttctctctctcttttttttttttttcttttttttgagatagagtttcactcttattgcctgggctggagtgcaatggcacgatctcagctcattgcaacctccgcctcctgggttcaagcaattctcctgcctcagcctcccaagtagctgggattacaggcatgcgccaccacgcccggttaattttttgtattttttagtggagacagtgtttctccatgttggtcaggtggtctcaaaccccctacctcaggtgatccacccgcctcggcctcccaaagtgctaggattacaggtgtgagccaccatgcccgaccagcccctttcttttgatattttgctttgcactaatctcctaccagctgggacatttacagagataggaaatagttaagaaaattaaaaaaagaaaaaaaaagaaaaaaaagaaaagaaaactggctgtgccctggcatttacaaaatttctgacccaattatttctcacaacactacttacttgtaaatctcacacaacactgcttacttgtaaatctcacacaatttcattcccatgtatatattcaagagaattgagggcagggactcacacagacacatgtattctaattctatagcagccttattcacagtagtcaaaatgtgattgtggaaacccacatgtttatcaacatataaatggatgagaacagtgtgttttaactatacaatggaaaattattcaagcactaaacaagaatttctgatatgtgccaccacatggatggatcttggaaatattatgctaagtgaaattagccagatatagaagcacaaatactgtatgctttcacttatatgaggtgcctagcatagtcaaattcacacagagagaaaatagaatagagattatcaggacctgggggtgggagagaatagggaattatgtgtatgtatatgggatgctaagtagaaatagcaagtggtatggtaacatgtatagtataatcccatccagtatgtattttagtttgtaccagcattgaagaagggtcttccagatggacagtcccagtggttacacttgccataggcaacaatgcccctgggccacatcttggaagtctatttgaattacatttcaatgcaatttattcttatgaatactctaatgaaacagctcttatcaaggcacccagtgaccaaacacttgtcaaaatctacgtcaaccctgtttccttgtcttattcaaactctcagttacctgtgacagagttggccactctctcatctttagatactttcttctggaggcttccaggagaggacatccacctgttactcctcctgcctcaccagcctgcccagtctcttccaggctcttcctcctgctaacctcaggggttgccagcacttggactcctcttgagcactcaatttttaaatttattttttatttttatttttgagatggagtctcgctctgttgcccaggttgaagtgcagtggcactatctcggctcactgcaacctccacttcctgggttcaagcaattctcctgcctcaccctcccaagtagctgggactacaggcaaacgccaccaaagccggctaatttttgtatttttattagagatggggtttcaccatattggccaggctggtctcgaactcctgacctcatgatctgcctgcctcggcctcccaaagtgctgggattacaagcgtgagccactgcacctggctgagcagtcattttctgttataattcgctcctaactctgaaaccagttggcctgttctggacccggggcttcaaataacttccgcatgataatattctcaacattccatccagatctcccttgcaagctccagactcccaggtccagtggcctgctgaaaaatcttcccttgtttggctcaaatatgtcatggctgaacatgaaacgtaacccttgacttcccctcctgtcaactcccctgagccttgttcctctgagtaagaggcagcacccaggagctctgaacagtaggacacatccttgactcttctctcttttcacatcatcagaagttctacaggagctacctctgcctggttcactcccactcaggtttcaggttttaatttgagcatcagtccccacaccagggaagcctccactaacctctcagactcgtttgggaaccccctccatcatcatatgctctcagatccacacacccttctgtactgcactgaacactatcagcaccggtcctttatgtttatgtccagactccactaaatagtgggaatggtagggcctttctctaccatcccacccagctccaaaaacactgctcaggttcatatctagatttcgaaatacacaaccttctgttaacatccactaacactagccaagtccaggccagcacgacctatcttgcaactactactgtggttttcaaactggtcttccagctcccctctagcatctttttttcccaaccaagagaaggagtaaacttcttcaaacactaatgaaaactgctgctttgctcaaaatccagtaactgtctataacatggcgacaagatcccatgtgatctggcccctgcctacctattgaagcccatctattattaccttggcactctagctgtggtccaaggatcaacaacacagatgacacctggaagcaagttaggaaggcagactttctttcatttttgagacagagtttcgttcttgttgcccaagctggagtgcaatggcaagatctcggctcactgcaacctccacttcccgggttcaagtgattctcctgtctcagcctcccgagtagctgggattacaggcgtgcaccaccatgcccggctaattttttgtatttttagtagagattgggtttcaccatgttggccaggctggtctcgaactcctgacctcaggcaatccacctgcctcggcctcccaaagtgctgggattacaggcgtgagccactgcgcccggccaggaatgcagactttcatgccctactcttaatctgctgagtcagaagctgaatttgaagatccatatttcctgtgaaagtttgagaagtacatctcataagcttccccctccacctgattcagccctaagggtattgcatattcctcaccactgaggtatttgaatcaacaaaatgtcttaggtggcgtagacccaggagggctgcaaaatgcttgggcttgaactgggagaggacactagagagacagtcccaagaagaccatgcggccacggccgagcctgcctttccagcactgccatggcatgtcccactgctcctgaagtacaggaatggccactcatgggaactgaccgggagtgactgtgtgcgcagtcagcaacacactgaggctggagtgcttgtagcaggatgagccgcagacgaaacccctcagacatcacgttaaagaaggaagggctttattcagccaggagcatcggcaagactcacatcttaaaaaccgaactccccgagtgagcaattcctgtccctcttaagggctcacaactctaagggggtccgcatgagagggtcgtgattgattgagcaaacagggagtacgtgactaggtgctgcatgcactggcaattagaacagaacagaacaggacagggattttcacagtgcttttctcttcaatgtctgtaatctacagataacataaccgattaggtcaggggtagatctttaactaccaggcctagggtgaggcgccgggctgtctgcctgcggatttcatttctgccttttagtttttacttcttctttctttggaggcagaaatcgggcataagacaatatgaaggggtgtctcctcccttctgctcacacactgaggctggagtgctcgcaccctgctacccatgtgctcaccctgggattcggggaagcatgcacacaggcaagcaggaaaaacacgaggatcctggaaggggatgggcagaacgtgatggaggagagaggtttctgcttcctccaagggccaaaagtcactgtctgacatgtgaacgagatactctaacagagttcggggttggggtaggggcagatacccagtacctgctacaaaaggccagtagtaaagtcacaacaaataccaaaatgtcatgtttcaaaggctctttagataagcatcgattttaaaaccatataagaattaaacttgttgccaggcagcatgactcatgcctgcaatcacaacactttgggaaaccgaggcgggaagatggctcgaggccaggagttcaagaccagcctgagcaagatagcaagacctcatttctccaaaaaaaaaaaaaaaaaaaaaaaaaaattagctgagtttggtaccatgcaccagtagtcttaactacttgggagactgaggcaggaggatgtcatgagcccaggtgctcaaagctgctgtgagctatgattacaccactgcattccagcctggataacagaataagatgcgatctctaaaaattaaaaaaaaaagaattaaatctacttgtctattacacataaacttcaagcaactcaaggatccaagagaatacaaaattgaaagaaaaattttatcaactgactttaccaaaacaaacccaccacctattcaacttatgaaagctctttttaaaatcaacttttattttagattcagggagtacacatgcaggtttgttacttgggtattttgcatgatgctgaggtttaaagtatgattgattccatcacccaggtagcgagcatagttcccaacaggtggtttttcaacctttcacctccctccctcccccgtctactagtccccagtatgtattgttcccatctttatgtccatgtttactcaatgtttaactcccccctttttttttttttgagatggagtctcgccctgtcacccaggctggagtgcaatggcacgatcttggctcactgcaacctccacttcctgggttcaaatgattctcctgcctcagcctcccgagtagcttggattacaggcacctgccaccacgcccagctaatttttgtatttttagtagagacagggtttcaccatgttggccaggttggtcttgaactcctgacctcgtgatccacctgcttcggcctcccaaagtgctgggattacaggcgtgagccactgcacccagctgtttaactcccatttctaagtgagaatatgtggtatttggctttctgttcctgtgttaatttgtttagggtaacagcctccagctgcatccatgttgcatcaaacgacatgattttattctttttttttttttttttgagacagagtcttgctctgttgcccaggctggagggcagtggcacaatctcggctcactgtaacttccaccaggttcaagcaattctcctgcctcagcttctcgagtagctgggaccacaggcatgcaccaccacagtcggctaatttttgtatttttactagagacggggtttcaccatgttggccaggctagtctcgaactcctgacctcaggtgatccacgcctcccaaaatgctgggattataggtgtgagccattgcccctggctgatttttttttttttttatggttgtgatgaacctttgtgtaaagaaaatttacaaagatatctcacattaattttttaatataagacttaggaatccagagtgaagatctattttgtcaatgagccactgataaagacaatatttatgtattttataacatttctttgatgtggcaaattttctggaacattatacatgagtaaatttggttaagaatttcctgaattacttacgtacatttacctccagtcgtgtgaggatgaggagccttcaagccaacaaagttgtagacctatatccatggaagtgacgagcaggtcatttcatcaggaaactctcacacttgtcagcagatagatgctgcacatggaattagttctattcctcagaaatttatatatatttgtaagaaatgtgatttaaattcaatactatatagtttatgttattgtgtacacagcatatgtttactccataagcaggaccttgactccattatcaggtttaatacttttccaggtgttttgtttttagtttcctgggcaaatagtgctatcatctccaatcacgatacttgcttcttccatctggttcttcatagtgatcttttttttttgtttttgtttggagactgagtctcgcactgtcacccaggctggagtgcagtggtgcaatctcagctcactgcaaactctgcctcccgggttcaagcgattctcccacttcagcctcccaagtagctgggattataagcggccgccaccatgcctggctaatttctgtatttttaggagatatggggttgcaccatgttggccaggctggtcttgaactcctgacctcaggtgatctgcccgccccggcctgccaacataatgatcattttttgacagtaagtactatagactaccgtaataataagtggggttaaacagacatatttgctttcattagattctgttcctcctttcactgggaagcctctcacctaccggttcctcatcgtgctgtgctctgaaacataccttaatgaagaatctgatatccaaaaaattcatcttcaaaatggaagacaaaagaaaaactatcccaggcttaaaatatatatattgagagaatgtgttcctactacaccagacctacaagaaagatcaaaggagggtcttcaatttgaaattaaaaaaagtcaaaatccacagggaaaaacaaagagcaccattagagattatgtaagtgggaacgacaaatggtatgtgtatttcttcatctttcttctcgttatagatttaaaaggcaactgtgtaaaataataagtagtcaatggattgttgggcctacaacatagaagaatgtaacatgtgcattatatttacaaatgaaaccataaaaaagtgagctaactaaatgactaccaaagcaaagtagaaagaatgtattgttggatgtgtaaacctaaggattgttacacatgcaacaaaataccccagaaaggcaaaaaatataatagggctttagaggataaatatgtttgtatatcactggaatttatccatagatcactggaaaattgaccctgattgggataagttatttacatgataaacacttgagtaaacactacagaacctcaagtcatcctacattgtaaagacgtattggatgaaagcagaatttactgtccttcctaaattaaaaatggacactacatacattctataacattatgaggacaagatttccctcattcatccaacttggaagtttccatgttatattacatatttccccttcaacattcactctacaattagaatcagaaaattgtttcttgtgcaggtcgtgatctctctatatccatttcttgaacttctagcccaggtacagaattacatttcaacgatcccttattttgcattatatgttctcaaaaaattttttttttttgagacagagtctcgctctgtcacccaggctggagtgcagtggcgcaatctcggctcactgcaagctccgccttctgggatcacgccattctcctgcctcagcctcccgagtagctgggactacaggcgcctgccaccacgcccagctaattttttgtatttttagtagagacggggtttcaccgtgttcgccagggtggtcttgatctcctgaccttgtgatccacccccctcggcctcccaaagtgctgggattacaggcgtgagccaccaggcccggcctccctgactttttttatggtgcaaaaatacacataaaataaaatttaccctctttttttttttttttgagaaggggtctcactctgtcaccaagttggagtgcagtggcacgatctctgttcactgcaatctctgcctcctgggttcaagcaattctcctgcctcagcctccccagtagctgggactataggcgtgcgccaccacacccagctaatttttgtatttttagtatagatggggtttcaccatgttggccaggatggtctcgatctcctgaccttgtgatccccctgcctcggcctcccaaaagttctgagattacaggcatgagccactgtgcctggacaaaatttaccctcttaaccctattcatgagggccctaccctcatggtctcatttcatcctaatgtcctcccagagatcccatctcctcattccatacattagagagtagtctttcaacgtatgaatttcaggggacaaataaactcaataatattgtaatctccaccccaatgtatttcctcacatgcaaaatacatttattccatcccaacaccatcaaaagtcttgactcattctatcattaactctgaagcctaaaatcaaagtctcatttaaatagcatctgaatcagataagggtgagagtcaatgtaacattcatgctgagccaacattcttctccagatgtaaaatcaaatcagttgtgtacttttaaattataatggtggaacagttataagataaacaatgctattccgaaggggagccatataaggggtggaagagtgacagttcccaagcaagtccaaaacctggaaaggtaaacttcatgagatttttttttttttttttgagatggagtttcgctcttgttgccaaggctagagtgtaatggcgcgatctcagctcactgcaacctctgcctgccgggttcaagcgattctcctgcctcagacccctgagtagcttggattacagccatgtgccaccacgcctggctaattttgtatttttagtagagatggggtttctccatgttagtcaggctggtctcgaactcccaacctcaggtaatccgcccgcctcggcctcccaaagtgctgggattacaagtgtgagccactgcgcccggccaggatcttaaggctaaataataatcccttttcattcaatactctgccctcaaggaattgtgacacagcaattgtgtcccagcatctctgttagacatggatcaaacccaaatagcgtttgatggcactgcatccacacttctgggtttagctcatcttgtttgtggaaactccaaaatgtcccctactgttgatgctcaggaggcagccttcatgacctctaaacagctactgggatccttcttctcttgtctctaagaataccatgcattcagctctatggatggttcctgtaaaatcatacaggtccaacaactttcattttttcctgtgaccttcactttcagttcaaaggggctattttactgctgaggtggctaagtccatggttaacaagaataccactcttcctatcaaaaggtcttggacacacccttggtgctgtcttcccagcatgccttttcatctttgcgataattgttttctaaacattttcatttcaatttctcaatttcttcttgcttaataattccatctccaacatttttctctactcacattttatttatttatttattgagacagaatctcactctgtcgcccaggctggagtgcactgttgcgatctcggctcactgcaacctctgccacttgagttcaagcgattctcctgccttagcctcccgagcagctgggattacaggcatgtgacaccacatctggctaatttttgtatttttagcagagacagggttttaccatgttggtcaggctggactcgaactcctaacctcaagtggtctgcctgcctcagcctcccaaagtgctgggattacaggtgtgagccaccgcgcccggcctctcctcacatttagtatatgcagtcaagaggatccaagttgttttttttttcctttttttttttttttgagacagagtctggctttgtcacccaggctggagtgcagtggcgcaatctcggctcactgcaagctccacctcctgggttctcaccattctcctgcctcagcctcccgagtagctgggactacaggcgcccgccaccatgcccggctattttttttgtatttttagtagagacggggtttcactgtgttagccaggatggtctcaatctcctgacctcgtgatccacctgcctcggcctcccaaagtgctgggattacaggcgtgaacccaccacgcccggcccaggttgtttttttcaacacttctaagaaatattgtcagctcaatatcaagtttcatcacttcctagttctagtttccccaaaacagtagcaccggagtacaatgcaccaagttctttgccactttctgcaacggttcatcttttctctattatgcagtaatattgtcctcaattctgagacctcattagtattgcctttattgtccatatatccaccaaaattttgtacatgattttttatgtgccctagtaagatggaagctttctctattcctctttttattttatttttttagagaaggggtcttgccacactgcctaggctggtcttgaactgctaggctcaagcgatcctcctgcctcaccctcccaaagttctggcattataggcatgaaccaccataccccgcctgcctgtcctcttttgtgagctcttaccagcgtccaaagacaaaattacaacaaatttaggtactggcagatttagtgtctgatgagggcctgttttctgattcacagacagctgtcttttttgtttattttttgaggcagagtctcactctgtcacccaggctgcagtgcagtggtgtgatcacggctcactgcagcctcggcttccctgggcttgggtgatcctcccacctcagcctcttaagtagctggaactacaggcgtgtgccaccatgcccagctcatttttgtattttttgtagaaatggggctttatcatgttgcccaggctggtcttgaactcctgggctcaagtgatctgcccacctcagcctcccagagtgctgggattacaggcatgaaccaccaggcctagcctcatagataactatcttaatgtatcctccaaggcagagagcaaaaaagcaagctgctgggcggactcacaataggtaaccaatttcattattgaggctccactctcatggtctaatccaatctgtattatattccaaagaagacgttccctaatctgtcacgttagggaaatggattagaatgagtggattttatgaagacatttattccctaacaggtggtatgctttttgttgttgactttttagagttctctaagcagtctgcatattaatttcttgtcagatacatgatttggaaatactttctctcattctatgggttgtctattttgatgccgaaagtttaaaaattccatatatttccatttattctcttatgggtcatgcctttggtgtcatatctaggaaatcattggaaaatccaggttcataaagcttttgccttatactttttttttttttttttgagacggagtctcactctgtcaccaggctggagtgcagtggcgcgatctcagctcactgcaacctctgcctcctgggttcaagtgattgtcctgcctcagcctcctgagtagtgggattacaggcatgagctaccatgcccggctaattttgtatttttaatggagacggggtttctccatgttggtcaggctggtttcaaactcttgaactcaggtgatctgccagccttggcctcccaaagtgctgggattacaggcgtgagccaccgtgcctggacagggaagggtacattttcattctgttgcatatggatgtgcatttttccccagcatcattctatggaaatactgtcctatcctccattgtatcgtcatagtacgcttgtcaaaaattgttggactcactatgcaaacgtgtatttctgtgctgtctattttgtcacaatggtctatttctttgtcagtatgctgatattaaatttttttattagtataaatttgctctaagttttgaaatcaggaagtgtcaatctaccaactttgctcttgtttttcaattttattttttatttatttatttttttgagacggagtctcgctctgtcgcccaggttggaatgcagtggcgcgatcttggctcactgcaagctccacctcccaggttcaagccattctcctggctcagcctcccgcccgagtagctgggactacaggtgcccgccactgtgcccggctaattttttgtatttttagtagagacggggtttcaccgtgttagccaggatggtctggatctcctgaactcgtgatccgcccgcctcggcctcccaaagtgctgggattacaggcgtgagccactgcacccgacgtttttcaattcttgttttgtatattcagagtcccttaagatgccatatgtaaaacaatggaaaaatgggtcctaaaaactaatcaagtggtcaaagctatccctaaaaggctagcagggagcaaaaagtgctatttctcaatgagaaaataaaaatcttagagagatgttttgaaaaatgccatgtcacttttgaaagtgggccacatggtaagaacaaactaagcattcacacactaaagcagaaagaagctgaaattcttggaagtcttagagctgcctctacaatgggaaaaatgacccctctgcttcatgataaactgagtaaaaagactgagaaagcattaagtatgtggctagaggacacatcgctgaacaacatctcttttgataataaaataaagtgggaaaaaacagcctctataaataccactgtgagaaggctgaggagagcaaggaaaaggagtttcaggccagtattgtctggctgggctagctacataaagcgccagagcctcaaaaatttaaagaccacaggagaattgacactggcttatgccaaggcaatattagcattcccagcagagctcacaaaactcataaaaaggaagtctaccttccagagcaagtcctccattccaatgaattgggcaagccctagaaaaagaaagcggtccagtggtacctacatccatgactgccaaggaggccctggggctcagggcctggaaagatcacctactctggtgcagtgtggcaatgtggcaggtcacaagaacaagccaggccttggctactgagcaaacaatccctaggtcctttagaaccaaagcaaaacttgcctgcctcctttctggcaaaaatataagaaggcttgggtgatgatcatcttgtccttggaatggttctaccaaggcttcattcctgatgtgaagaaatatcttgaagagaaggggctgccactcaaggtccttctcataattgacaatgttcctggccatctccaatctctctactttgccacaaagaatgtggaagtgatgtccctgctgcctaacactacatcacagtgaaagctactcaatcaaggcataatcaagtagatcctgaccttcgggaggattcatgccatcctgatgctaactctgactgtaccatagtggatttatgaaagcacttcacaattgcacatgcaactgtccttattgcagaggctatagatgtcccagagctcaagaaactcaaagcatgctggaagccattatggagtgagggagtcaataattttaggggcttccccactattgatgcagtagttaggaatatcttaaatactgcaaggggagttggtaagaaaggctatctctgacaggattgaagacgatgttgagtaacacacagaagggcataaattcttacaacaaggaactcaaagatctgctcaaatgctctatagattgatgatgataatgatgacttaaaaaaggtagtgccacagatttggacacttgaaaaatttgcagtagttttttttattttttttgagacggagtctcgctctgtctcccaggttggagtgcagtggcgccatctcggctcactgcaagctccgcctcctgggttcacaccattctcctgcctcagcctcctgagtagctgggactacaggcgcctgccaccatgcccagctatttttttgtatttttagtagagacagggtttcactgtgttagccaggatggtctcaatctcctgacctcgtgatccacctgtctcagcctcccaaagtgctgggaatataggtgtgagccacctcgcctgacctgcagcagtttttcaataggcaaaactgttaagaaagttcatcatcctcaagtaagatccttcgatggaacaaagcctccatgtcacccatggaataacatgccaacaaacagtgcaagatttttttgatgactcaaaaaaaaagaaaaaaagaaaaactagcttcctacacttctcactaagcacctgcaaatataaacacagagccttccatggttaaggatctgcagccctgaagctgaacagatcttgacattagtattatttggcctcctccaacaagtcaacatctgcatcagaacctagttctttgaacactgatgatcatcctgatattctgtcaaggttcaagttagcctgatgtctcctgcttgtctataatgctacaacacatgacaatgttaggcaccatccagcaatcatcatcatcatcattatacttgggttatcaagagagaagcaggattttgataagtgttgacatgctcattcaggtcacaaaacaaaagcaatctgtgaatgttaaaacaaattttaatgttctgggtgacatataccacgtaggtgggcctgcaatggttgtgtctgcatcgaacatgtagagactatttttcttgtcatgattctctaaacaatacaatcaaacaactatttacatagcttttacaatgcatgaggtattaaaagtcatctagagatgatttacacagtatactggaagatatgcataggttacatgcaaatatgccatataacaaaggacttggcatctgtggatttagagggtgctggaaccaatcccctgcaatatattgggggataactgtatttaaaaaaattgaaactacttaaggctttatcccatgtttacattcatagggtctatctccaaagtgagttctttcaagtttctgaaattaaagtactgaatgttttcccacattccatacatttagagagtatctttccagtgagtccttttatgtctatgcaaggaacggagagaactcaatgctttcccacattccttacattcatacagcttctctccagtgtgagttttttcatgtcctcgaaggaaacgggaacgagtgaaggctttaccacattgtagacattcatagggtttctctccagtgtgaattctttcatgtcgtagaaggcaagtgagccaagagaatgcttttccacattccttacattcatatggcttctctccagagtgaatcctttcatggacttttaagttactgaaatgactgaaggcttttctacatgttttacactcataaggtttttctactgtgtgggtccttttatgttgagaaaggtatttgaaacaactgaatgctttcccacattccttacactcatatggcttctctccagtgtgagttgtctcatgattttgaaaggaagagagatcactaaaggctttcccacactgacatttatagggtttcactccagtgtgagttgcttcatgtcttcgaagggaaccggcaagactgaaggctttaccacattgtttacattgatagggtttctctccagtgtgagtcctttcatgtctttgaaataaactgggacaaccaaaggctttcccacatatcttgcatttctggggtccatctcctgtgtgtgttatcatgtgacttcgaaagctcgagctatgagataacactttcccacactgcttacattcatagggtttctctccagtgtgagtagtttcatgatttcgaactgaactaggacaatcaaagcctttcccacatatcttacatttatgtggtccgtctccagtgtgccttatcatgtgtcttcgaaagcttgtgtgatgataaaacgttttcccacattgcttacatgcatagggttgttctcccgtgtgagtcctttcatgtagtcgagtgtaatagtaacagctgaaggctttcccacattgtgtacatttatagggtttctctccggtgtgagttctctcatgtcttagataggtactgtaatcaggaaaggctttggaacactgcttacattcatacgctttctctcccgtgtggattctttcatgtcttagataggaactgtaaaaaggaaaggctttagaacactgcttacattcatacggtttctctccagtgtgtgttctttcgtgcaaatgaaataaactgggccaaacaaaggctttcccacacaacttacatttataaggtccatctccatggtgtgccgccatgtgtcttcggaggtttccaagagaactaaaggtttttgcacattctttacaatcgaagggtttctttccggtggggggcctttcatgtgtctggaaggagtgctgatgactgatggctttcccacgttgtttatgtgtatatggcttctctccatattcctgatgctcacatgatttgtgtccagtgtcaactctgatgttgcaattaagagacgaatgacccaagacgacttctccacactcaccactgtcacatggatttactcgaggagtgttcttgttcacaatactatctggaatctggccaaaagtttctccacattgactgtcatctttaatttcacatgtatgacttctgtaacaaataagaaatatattactaaaggtttgtttataagtgattttctatatattgaagtactagatttatatttgtaacattatcatgcaaagtacaggcttcatcccctgtttgaatgtgaagtgacagtgctgtgtaagatggtcccatcacagctattagcaaaacagtgatattcacatggagattctttctttctttctttcttttttttgagacggagcttcactcttgttgcccaggttggagtgcaatggcacagtctcggctcactgcaacctctgcctctcggattcaagcaattcttctgcctcagcctcccaagtagctgggattacaggcatgcgccaccacgccctgctaattttgtatttttagtagagacagggtttctccatgttggccaggctggtcttgaactcccgacctcaggtgatccacccgccttggcctcctaaagtgctgggattacaggcgtgagccaccgctcctggcccacatggagattcttaataccatttccaagggaactattttgcaaagactgaatagctatgtcacatttaactatatgttcctcgggaaaatttttttttatagagatggggatctcactatgttgcccaggctgatctcaaactcctaggctcaagtaatcctcccaccttggcctcccaaagtgctgggattacatgtgcgagtcactgtgcttggtcagaaaaagaattattggaatgaataaatttaagctgggcttgttcattttctctgctcgtttttaaaattttcttatcattctatgaaccactgcagggacatagctttcttttgtgggtgcaaattaccttagatttctcttggcattttggcactgatctccaatgttctggtcctcccatttcatttctaaaaggtagacccaggaaaatcactaaaaatgtttacaaaattatagaaaaactctaagattttacgcgtactgcaatcatgcatgattcattcaccaaagtacatgtgactcttcaacaacacaggtttgaactgcacagctccactcatacatgaatgttcttcagtctctgctacccctgggacagcaagaccaacccctccccttcctcagcccactcagtgtgaagacaacaagggtgaaaacctttatgaagatctacttccacttaatgaatagtaaatatagtttctcatctttttttttttttttttttttgagacagagtcccgctctgtcgcccaggctggagtgcagtggcgcgatctcagctcactgcaaactctgcctcccaggttcacgtcattctcctgcctcagcctcccgagtagctggggctacaggtgtccgccatcacgcccggctaattttttttgtgtttttagtagagacggggtttcaccatgttagccaggatggtctcgatctcctgacctcatgatcttcccgcctcggcctcccaaagtgctgggattacaggtgtgagtcaccgcacccggccagtttctcttcttatgattctcatcaacattttccttcccaagcccactttactgtgacagtacagtatgtaatacatatgacatacaatatatggattaatctaatgtttatgttatccataagtgggccagtcaacaataggttattagtggttaagttgcgggggacaaaaaaagttattagaggatgtaagactgtttgaggggctgacacctctaaaccctgtgttgttcaagggtcaaccatatcctctttccatatttcaaatcatgaacagcgttgatggccaggaaacaaatgtctctaattgactaagtgaagagatgatgtcatccttacctatacagtccaggttcctaatggtttcctgcatgacatttctgtagagactcttctgtgatggacccagcaaagcccactcctcttgtgtgaagttcacagccacatcttcaaaggccactgagtcctgaaacatcccacatgtgcagaggaggaaggttgagatggacagcactgagaatccatactcactgcataaactttgcatgatgctgtggtttccaagcatttattcgatgacatagtaaacccactcttattttgtctacactcactttttcccacaaagccattgtgatgctttagttgaatgtgtttggtaaagtaacagtcgaataggaacctgcctcttgttggtgagttaagtgagtgagtcttattgcctgcgtcacccctgatgtctatttctacagcggtctgtgtagttcttatcatgacaaagtacaactacctattgtgtagaagagttaccactcccagtcctgaaactgcatatcctgacaaatgctcatttgcaaacttggatctttcatggtgtctaggcaccggatcccactaatgtaactaataacagaggctgagtgtgcctaaactgtttatgcaaaatataggggccaggcatggtgacttaggcctgcaatcccatcactttgcagggccaaagtggaaggatcacttaagaacaggagtttaggaccagcatgggcaacatagtgagcccttttctcaacaaaaaataaaactaggtctgactcagtggctcatgcctataatcccagcactttggaaggccaagacaggtggatcacttaagcccaggagtttgagaccagcctgggaaacatggtgagaccttgtctctataaaaaatacaaaaaaaaaaaaaaaaaaaaatagcaagatgtggtggcgcatgcctgtagtcccagctacccaggatgctgaggtgagaggatcacccaagcgcaggaggttggggctgcagtgagccgtgatcatgccgctgtactccctccagcctaagcaacagaatgagatcctgtctcaaaaaatataataaaagtaaaaaacaaaaaataaaaaatacatatatatatatatatatataaatttttttttaacttaactcctattccccctctgagagtttggaagtttgttacatgatcagcagagagagaatacctgttagccacagcacaagttagaatgcttgtgctctccaaaactcatgctgaaacttcatcctcaatatgacaataatgaaatgtggggctttaagacttgattggatcttgaggtactaatccattcatagattaatggcttaatgaataaatggggtatctcaggagtaggcctagtgtccttaagagacgaggaagagacctgaattaacactgggcccctggccatgcgataccctgtgccacctagggactctgcagagtccccaccagcaaggaggctcttaccagatgctaagccttgaccttgggcttctcagtctccagaagtataaaaaaataatgtttgtttgtttttataaattacccaggctcaggtaatcctgttataagtaacaaaaaccagactaagacagttatgaagaaacactctggacactggatcactactgacggaccctagtagctaacgtttcacgtgtttggttgcaacttgttacatgggatatttagcccatcctatgcaattacactaagagagaacatttggaaactggcaactggtttccattagaccaaatgtagttaagcgtgacaaaagactaataaaaaatatctcactatctcaatggaaaaattacacatttttcattggataatgacaaaggaggaggaaagacagggaaagattgcacatgttctaacaaaaaactcagtgtcacctctcatgattatctataatatttcctaaattcctaaagagacttttagcagtcaacaaagattatattaccaaatctaataaaagtcacaaatatctgaaaaggttaaaaacctaaccggcagggtgtggtggctcacgactgtaatcccagcacttcgggaggcctaggggggcggatcaaaaggtcaggagatcgagaccatcctggccaacatggtgaaaccccgtctctactaaaaatacaaaaaaaattagctgggtgtggtggcgcacctgtcatcccagctactcaggaggctgaggcaggagaatcgcttgaacctgggaggcggatactgcaatgagccaagatcatgccactgcactccagcctggagacagagtgagactccatctcaaaacaaacaaacaaacaaaaaacaataacaacaaaaaaagaaaccgcccaaaaaaaccttctaaccaagaaagttacagctttccaaaaacagataaaggatttttaaactataatattcggcatcctatactattaacagggagataaacaaacagaaaaaggaaagcaaaaaatggttgaaaagctttgtggagtttttatttgcccttgtcccaatccctcctcacatcagagcccgtcttgaagacagcagaccaagttttcaatgtggatccctagagacagcagatcaggtcttacttgcaaattattgcctttgtattttccagttggtacaaggactatccaaaggtctgaaacaggctctcttttctttctttcttttttttttttgagacgggagtctcgctctgtagcccaggctggagttcagtgtctcgctgcaagctccgcctcctgggttcacgccattctcctgcctcagcctcccaagtagttgggactacaggcacatgccaccacgattagctaatttttttgtatttttagtagagacggggtttcaccgtgttagccaggatggtctcgatctcctgacctcgtaatccgcccgcctcggcctcccaaagtgctggggttacaggcgtgagccacagcgcccggccaagactctcttttccatttaatcagtgatggaacccaatcagggtcaaacatggcaagaactgcttcaaaatgttgcaaaatacacagaaagccttcaaccacctggaacaacagattacggttaagacgaacagcagacctactaagtcttgggaagaaaagctggagataaaatttccttcagaaattagggtactgaaaagcacacaggtatattatggcatacttttcttatactacctgatctaacagatacaaatttgtttgaaataatactagcaatgtattgggtagtaacagcttccgatagggcaaatgaataacagtgtgttatatgggatgggaggatggaatttggaacagtaagtaataccagcactactcccaaagccagtatagcattatttgaaactgaaggtccattagttataaatggtatactacaaactatagggaattcactaataaaatttaagaaacaagtagacttactatactaatagaagcaagcaaatagaatcatatagaatgctcagttaaaatgaaagcagaaaaagtggagaagttgaaaaaacagtcaagtataagaatagaaaacaattgacatatgtacatattaatccaattatgtcaataccactttgaatgtgtatatctacatataccagttaaaaagacatggactggctgaatagaattaaaaaaacaaggctggaagggcacagtggctcacgcctgtaatcccagcattttggaatgctgaggcgggcacattgcttgaggccaggagtttgagaccagcctgtccaacatgatgaaaccccgtctctactaaaaatacaaaaaaattagccaggcgtggcagtgcatgcctgtaatctcagctacttgggaggctgaggcatgagaatcacttgaacccgggaggcggaggctgcagtgagccgagattgtgccacctcatttcagcctgggcaacagagcaagactctgtctcaaaaaaaaaaaaaacaacaaataaaacaaggcccagcaatgtgtacatgaaaaccattttaaactgaaagatgcaaatacattaaatataaaggtatggaggaatatatgccattctagccctaatcaaaagaaatatggactagctattttaaatttagataaatcaggttttaggtcaaggaaagatacaggggatgaagagatttcataaagataaagaagtcagttatacaagaagacataataatcattaatatctatgctcataaaacaaatcatcaaaatacataaggcaaaacttataaaaccacatagcaaaatacacatgtactagatggcttcccagtacctactggctttcaatgtgtgctaacctcttctttctgggatctctaaataatacatagtttctgttatttcttgcattttgttgagttgcttcctctgtgtcttacctgaccaatatacctgaatctaatttctacccagtcagggctttctttgtaagattattttggcagtggctatcttggtagtaataaaagaaaaactggtcagacaatgggccataaggtgtctaccaggaaaaacaagtttcctctaagacggaaacttggtcactggtctgatatttaggcattaggtcaccttgtactatcctacaagttacgtttggaaggctttcaaattaacctgtttggggaggtcttatgatccagggcttatatcttgtccctgagtaaagaatctttttttttttttttcctttgagacggagtttcgcacttgttgcccaggctggagtgcaatggcatgatcttggctcactgcaacctctgtcgcctgggttcaagtgattcttctgccttggcctcccaagtagctgggattacaggcctgtgccatcatgcccagctaattttgtatttttagtagagacagggtttcaccatgttggtcagggtggtctcaaactcccgacctcagatgatccgcctgcctcggcctcccaacgtgctgggattacaagtgtgagccaccgtgcctggccgttttcttatgtaagaaaataaagtagatcccaaaggaagggactcagaaattcaactctgaaaattaagaagaagagttgtgcgtgacttatgcctgtcatcccaatactctgggaggttggagtgggaggactgcttgagtttgagaacagcctaagcaacatggcaaaacctcatctctacaaaaaatttaaaaattagccagggatggtagcatgtgcctgtagttccagctacataggagacgaaggcaggaggattgtttgagcccaggaatctgaggctgtggtgagccatgatcccagaactgcactccaacctgggtgatagtgcaagaccctgacttaaaaattaattaattaattaatgagaaaatggctgaaaattatttcacagtagatgaaaggccatacagaaaaaatgctcaacaccgatgttaatcagtaaaaagcaacatctaatcacatggagataaatatttataaggaataaacacacatgcacacatggtctgccagttaatccatacatgccaacgggttttcctagcacatttaaatttatccataatccacaacccagcacatttccccctatatgtacaaaatgtataaagtgttagcatttggggacaaaaacaaagatgacattgtcaacaaagtccagcaaaaatgaaacaattcaagtcctatgagccgtggaatatgagagtgaagtgggtgacccacacctcagacagcagcatgaatcaaacagactgaggcaaagaaactaaaaaaaaaaaaaaaaaaaaaccgcccgcagccgggtgaggtggctcacgcctgtaatcccagcactttgggaggctgaggcgggtggatcacctgaggtcgggagttcgagaccagcctgataaatatggagaaaccctgtctctactaaaaatacaaaattagccaggcgtggtggtgcatgcctgtaatcgcagcttctcgggaggctgaggcaggagaatcgcttgaacccgggaggcagaggttgcggtgagccgagatcacgccattgcactccagcctgggcaataacaagagcaaaactccatctcaaaaaaacaaaaaaaccttttcagcatcatattaatggaatattaagtgtaatattaattaactgaaaactcagaagagagaaaactatgcatctggattcatacatgataaacatatactgaataacagtcagtcggtttaaggctctgacctgtggtgcctctgacttctgataacaaaggtgtgccgttcgctgaacaccaaccaattctccagcaataactgggtgtccagtagttcaattcttataccacccagaattaacacagatcccataagtttcttgctagagggctcagtcccacaacaggcccccactgcagatgtcatttgtaagccccaggaactaaccttttaaccaactgtgtataaatacaacagcaccatcctctggttcaataactggctaaaggccaggcgcagtggctcacgcctgtaatcccagcattttgagaggctgaggcaggtggatcacctgaggtcaggagttcgagacctgcctggccaacatggagaaaccccacctctactaaaaatgcaaaattagccatgcatggtggcgcatgcctgtagtcccagctactcgggaggctgagacaggagaatcgtttgaacccgtgaggcagaggttgcgatgagccgagatcgtgccattgcactccagcttgggtaacaagagtgaaactccgtctcaaaaaaaaaaaaaaaaaaaattggctaaaataactcatgaaactcagcaaaacactagtaacttaaggttactagtttgttataaaggatttctcaacaacagccaaatggaaaagaggtattcagcaagggaaagggcagggatggttaaaggtttccctttttttttttttgagatggagtctcgctctgtcgcccaggctggagtgcagtggtatgatctcggctcactgcaagctccgcctcccgggctcacgccattctcctgcctcagcctcccgagcagccgggactacaggcaactgccaccacgcccagctaatttttttgtatttttagtagaaacggggtttcaccgtgttagccaggatggtctcgatctccagacctcatgatccgcccgcctcagcctcccaaagtgccgggattacaggcatgagccaccgcgcccggccatttttttgtatttttagtagaaacggggtttcaccgtgttagccaggatggtctcgatctccagacctcgtgatcggcccgcctcagcctcccaaagtgccgggattacaggcgtgagccaccgcgcccggccatttttttgtatttttagtagagacggggtttcacggtgttagccaggatggtctcgatctcctgacttcgtgatctgcccacctcggcctcccaatgtgctgggattacaggcgggagccaccgcgcccggcaaagctttccctcttgacaccaccttcctagcgcatccacgtgttcaccaacctggaagctgtcccgatgtctttgttcaataaattttattcaacttaatttctagcctccctccctttcctggggtcagaagatggggcttaaagttccagtcctgtcatcatgtgtttgctctttcaggtcaccagtccccatcctcaagttagttacctagtgacctcatgctgagtcacctcattagcataacttcacctaaggtctgacaagagctgggaataacaaaacacattcccatcactcggaaaaatccaaggagtttaggactactttgccaggacctagaaataatgaccaaggcgggtgcagccgctcacgcctgtaatcccagcactttgggaggctgaggtgggcagatcatgaggtcaagagatcaagaccatgctggccaacatggtgaaaccccgtctctaataaaaatacaaaaattagttgggcgtggtggcacgcgcctgtagtcccagctactcaggagactgaggcaggagaatagctagaactcaggagtcggaggttgcagcgagctgagatttcgccactgcactccagcctagcgacagagtgagactccatctcaaaaaaaaaaaaaaaaagaaaaagaaaaagaaacaatgaccaaatatgttttaggctgggcatggtgactcacgcttgtattctcagcactttgggaggccgaggtaggagaatcatctgaggtcaggagttcaagatcagcctgggcaacatggcgaaactgtctttacaaaaaatacaaaaattggctgggcgtggtggtgcacgcttgaagttccagctacttggggggctgaggcaaaaagattgtttgagcccaggagatggaggttgcagtgagccgagatcatgccactgcacttcagcctagatggcagaacaagactctgtttcaaaaattaaaaaggaccaaatatttttaaaaattatatcacagacccaaataaactctcagattcataaaccctttgtccagcaggcagaaccaaaaggtgtctttctctaagtcagccccaacagactttcaaatttgtacaatattctgattaaacaaacacagtgaatgtaaaaccagacttctaataatgttgaatttaaccccagctctgtaatcctggttaatagctagaattaaataaatcaccttaggccaggtgaggcggctcacatctgtaatctcagtacttagggaggccgaggcagccggatcacttgagcccacgagttcaagaccagcctgggcaacatggtgaaacctcatctctatgaaaaatacaaaaattagccgggcctagtggtgcatgcctgtagtcccagctactggggaggctgaggtgggaggatcgcttgaggctgggaggcgaggtggagttttgtagtgagctgagatcatgccactgtactccagcctgggaaacagagtgagactctgtctcaaaaaaaaaaaaaagaaagaaagaaaagaaatcacctcagtcttctaccacctaagtcctgtgtgttctgaacaaacagctgaatgcagtgtaacactctccgcattgcttcgactatgccccctttttaaacctgtaacaagaccaaaaaccccaccaaattcccactttgcctcagaaatgattagctgaacaattctgtcttcaccaaccaggctgcacaaaattaatgtagagcaaactttccttaagtttctcttcctcctgctggactcagtctgagccagcacacaattcctctcatttatttattttgagatggagtcttgctctgtcacccaggctggagtgcagtggcacgatctcagctcactgcaacctccacctcccgggttcaagcgattctcctgcctcagcctcctgagtagctgggactataggcgtgtgccaccacacctgggtaatttttgtattttttagtagagatggggttttgccatattggtcaggctggtcttgaactcttgacctcaggtgatccacctgcctcagcctcccaaagtgctgggattacaggcgtgagccatgcgcccatccacaatccctcctttttaacctctcctaagaactgactgaagtcaaggtgaaacattctgtgatgtaggatctgattttcaccttccatcttactctctctcctaccttctagatttctaatattgtttgctcttcactttgaaaagcaattttctggctgggcatggtggcttattcctgtaatcccaccactttgggaggccgaggtgggctgatcacttgaggtcaggagttcgagaccagcctggccaacatggtgaaaccccgtctctactaaaaatataaaaattagctgggcgtggtggtggtcacctgtaatcccagctactcaggaggctgaggcaggagaatcacttgaacctgggaggcagaaattgcagtgagctgagatcacgccactgcactccagcctgggcaacagagcgagactccatttcaaaaaacaaaaaaaaaaaaaaaaaaagaaaagcaattttctgcctaaactttgagattcttgtagatcttatagttggtagttttctccttttgcaatatgcttttagagtgaagtcacttcttgcccaaatccagatttattttacttgagaatgtctagcaacagtgccacaacagtaacaaagacctcagacagggcatcacaccacatgtctctgcctgtggatctccaactttccagtgctctgcagcttctctcagtataaaaggctcctcccatgtttggaatgaacaggttgggacacctgccagggaggttccccaggaagaaccaactcaactgggtcttcaatgacctccctttgcaggctccagattgaccttagctcagagtcagtcgcctcaggcttctccaccccagtcaaggctactcacttacccttacatgccttacatgggtatttaaaaaaaaaaatacccatgtgtgatgaatccagtaaaatcactccaatccagcatttatgtttataggagggaagaaaaccacaacgcatctatattttatagcttaatagaaaaagcacaagtatctatccgtttcagaaaacaaatgtcattaatttatcattttccataataataaatcatttagtaaatgaataatgatatttgagttctttagctgttggaaagtcctgtcccacagaatttagcattagtctgtcaagtccacataacaggaacagaatagttatccactgtctcaaattctccactctacaaaggagacgaactaacattttggtaaatctttataattcatcaatatatccaccacactttcttgcaaaaatgtattcatttttctgcagtcataaaggaaaagtttttcccaatttctgttcactgctaggccctgaaattccgtttgaaatcatccaataaaaaaacagacctgaggctgggcacggtggctctctcctataatcccagcagtttgggaggccaaggcaggtggatcacttgaggtcaggagttcgagaccagcctggccaatatggtgaaacctcgtctctactaaaaatacaaaagttttagctgggcatggtagcatacgtctgtaatcctagctactcaggaggctgaggtgggatgattgcttgaacccaggaggttgaggctgcagtgagccaagatcccaccactgcactccagcctgggtgacagagcgagactccgtctcaaaaaaaagtaaataaaagttttaaaaagaaataaaatataggactaaatatgtaatgagtttgctgaaacccaacttgttcttgtctctttgaacatactttatcttctttattaagctctaatgataaaatgcattttgcagttaataaaaagctgaaatgagtgaacaaatcttttcaagatgacaaatgcagggaggggctgactggaacacagacaaatctgactactttagtgtcagttcaggtcctcttatcacttgggacatctcccaccccagtgctgctcactgaactgctgagtaattaccctccaaggagaagctccctcaataccgccaaccagctggctcatcagccatgtgtccccagggaatggaaactggggtggggaagaaaagctgaatgtcttaagggctttgctttttgaggaacagtataccaggaaactcctcccaccccacgacatccagctgctcccctataaggtcccaccccccacctctggctgtcctctgggaggagtgactcaaagctgatattcactagacactacaaaagacttagcagctatgagcatcttggagcagccccaaacagttctgtaacccaggaccaggacaccatagagggtgggctgacagatcaccctgtgccatttgcaaagaggaacctcgactgaaaatattcgggtatctctgtgtagacaagataaaggacagccacacatgcactattttttttttctttttcttttttctgagacggagtttcactcttgttgcccaggctggagtgcaatggcgtgatcttggctcaccgcaacctccgcctaccgggttcaagcaattctcctccctcagcctcccaagtagctgggattacaggcatgagccaccaccccggctaattttgtatttttagtagagacggagttcctccatgttggtcaggctggtctcgaactcccgacctcaggtgatccgccagccttagcctcccaaagtgctgggattacaggcgtgagccaccgcgcccggctttttttttttttttttttttttcacactggagtcaagtggttattctttgcttcctcacatgtgaaatgttcacaaacacaaaaacacatcttttaaaaagagccatacattgctatgtgaaaagaaagtgacaattaaaataatgcctctgtttgaaatattgcctgagggacaaagagttcataaagttgctgggaattgatgagagacagttagcctggggaaggctctgaaaaccaagagatttgctgccagccctaggaggagttaggatgaggggatagggtggtggatttgagaccctgctgcccacatctttggaagactcggagggaaaccggtcacctttgggaagaaagaagggactggggaacccacagatcacagcttctcttccaaagcacaaagcccacacacacgagtctggattctgcctggtgaccctccgttgtcaccgtgcagcgtcctcaccgggttcacaggaactgcgagccaggctggaggcgagattgcagttagatattaaccaggtgccctcagccccgctgcctcacggggccgcctccctgagagtcaggtcacagcagacgctgaccgccggcttcctcatcgtgcccggggataagatctcttgagagttgctcacgggtcgcctcagttctttctcggatcctgaattgcagcggaaaggctggcgccaaccaggctgaagaccccacaagggaacccactcagcagaatgcggtttcttcacctccagtcccaggagtcacctctcacttctccaccaaccagcgaccccacactccagccgtccctgtccacacctctaaacaccccatccccaaacctctcagggaggcggatctggggtgtcctcccctctcccccattaaactgtttctgctgcagccttcggcgtctcggtgcagtgactcgggccgtgaacctgtgccggttacaactgcacaatctggggagacgcggagctgcgggcgcggagctgcccagagagggcgccggggccggggccgcagcggccgagcagggacgggacaggacgcccggggtcccggctgccgccccagccccatcttgcggcccaggggaccaagggcagagctgcgccaggggcactgggatttgcagaccccggagtcgcccagggcgaggcccgggtcccctcacggtcggttccggccggttccaacctgccccttctttgcctcgggacgccgggccccgcacactcaccatttcccagcttccaggtgtccgggtgtcctccttaaaagccagtgtgggtcccagcgcgacagacgctgatacagaccttccagggcgtctctctctcagcgccagagccaggactcagagcgcaggggcgtggagaagactccgcgggctctttgaacgtcgcaccctcctccctgcagcgtgcctgattgacagttctcacaatccccgccccctcatccctgattggatagtgctccaggtcccgccccttggtggctgattgacagaagaagcgatctcacagtgctgagtggagccggatgaacaggttccaggcacgacccttggcaaggcgggcttcctcccaacggagtgacctgacccctcccgaagtgacgtttgcattttagaatttcctgattgtattcagtgggttcttcctgctttttcctcctggacagggactcacaagtgtgtgcagggaattccaggctccctgtccagtggagccattcccggacctcggagcaggaggggagcccggggcacacaggccaccctgcagcaggagggagggcctgatgtcctccagggatcaggaatttgggatgaggctgttggcgacgttgccaagcctttccctcaccttatctctcaatctactcattttcagcccagaagataaaaacaggacaacaaaataaaatagttgagtatgtggaaaaactggaattatatggcagcaatatttcataaagaatcaaaagagaagaaaagcaaaaacttgaacaagctcagagaagcagcctactgcactcacagttcacaagcagaccccctttcaggaggtcaaacatatccccaagctgggaagccaggcaatgattcctaaaatggagctccggggtggatcagaagctggtgataagggagggacaattaagaattttactctgaggtctcaaaatacctgtcccctctgcacagcgtggaaatgctccctccttatgccattaaatgttaatgaattaaacgctccaatcaaaagccaagacatcacactttgaatttgaaaacattagcctttctccatatgtttatgaagtaaaaatactagacttaaaagcgttatggccgggcgcggtggctcacgcctgtaatcccagcactttgggaggctgaggcgggtggatcacctgaggtcgggagtttgagaccagcctgacaaacatgatgaaaccccgtttctactaaaaacgcaaaattagccgggtgtggtggcacgctcctgtaatcccggctcctcaggaagctgaggcaggagtatcgcttgaacccggcaggcagaggttgcagtgagccgacatcacaccactgcactccagcctgggcaacagagcgaggaaaaaaaaaaactccatctcaaaaaaaaaaaaaaaaaagcgttatgaactagaagctggtagccatggctaaatagaaaggagctgaacatgagatgtcaatagatgaaatgaaatcttcaatcaacttctagaaactatagcattttctgccaggacaaatgggcacgtttagaaaatgaatgaaaaaaatgacgtctgagtataacctaatgcataaatgatactgtttccttaaaaaaaaataataagcacacacacagacacacacacacacactcccacagtctattatgctagaaactgctctctgaaggataaactactattttatgaaatgctccacccctcactcctcacattaactgctcctggaacaatgttctatttatttgtttccacacatattaaaagagggcacaatgtatcaaactaactgattgtcaggggtttatatacagattctgtatatttttacaaatggcaacaagtaagtagttgatttctgcaatgatttaaatacatataaaagcttccagacaaaaatagctgttcgcattaccatgatgaaggaaaaatcaacaatggtgagacccacaccccctcccccagagaaagtataaaagaaatcctaagagaagctagaaagcccaaaatttgtatgtgcaagtttaaacacaatatagaaagtattgctgttagtttcctcacagtcagttctatggcaacaccatgcttttctgagttaggatgtttatttctgagtttgtcttttttttttttctgagatggagttttgctcctgttgcccagactgaagtgcaatggtgcaatctcggctcaccgcaacctctgcctccgggttcaagcaattctcccacctcagcctcctgagtagctgggattgcaggcatgcgccaccacatctggctaattttatatttttagtagagacagggtttctccatattggtcaggctggtctcaaactcctgacctcaggtgatctgcctgcctcggccacccaaagtgctgggatgacagttgtgagccactgcacccggctatttctgagttttttaaaagaaaaggaaacacaactccttccccaaccctctgtcacgaagatatcctctaatatctgctgctaaatgtaccatttcagtgtgagttaactttaatgcatgcagtaaggagctcagttcgtgtttctgaaggtcaatattcaacttccttagtagcttgttgaaaagactttcccctttaatttatcttggcctatttgttgaagattaattaactatccatgaagagtgtcttagtccatttgtgctgctataatgaactactgccaagtgggcaatttataaagaatattaattagttttctcgtagttctggatgctgggaattccaagataaaggtgccagcacctagggagggccttcttactgcatcttctggagggaaggaacactgcatcctcacagggcagaagacagaagggcaagagagggcgagccccatccatcaaaccctttatagtggcattagtctattcatgagggctctgccaaaagactaaaagtccccaactcccaaaattgtggtgctggggattgagttctcacctatgaattttgaggggacacaaacattcaaatgatagcaaagggggttatttccggactctcaattctgtcatattatttctgacatcttcccagtaagtctggctactatactacctacctgatgatggagagccccaccccattcctgacagtcaagcatgacacatgactgtcatgcacagatagaaacggtcctaaagccacaggaagatctcctagacacctccttggatgacctagacttactatcattttgagaaggcctctcttaacacaattgtagggaaaacatagtaactggttttgccataatttctccacatgaaacaattgaggcatactctttactcactgtaaaatcagcctgagcctctagctcattgctcttactagatctcgaatgttggcaaaggggaaactgccaccattgacaatgattccagatatgctttgggagtcttttttgccattggcacaatctgaaaatcctttgcatttacaacttgttctggtacacccattgccaatgaacatacataactggggcactattacaggttgttcacctctctactaaaatggctattgttcactgtctagcccatactaaggagacttctactacatctctgggcattaaaagactgctaaacaaggcggggcacaatggctcacgcctgtaatcccaacactttgggaagctgaggcaggtggatcacctgaggtcgagagttcaagaccagcctggccaacatggagaaaacccatctctaccaaaaatacaaaatgagccggcatggtggcgcatgcctgtaatcccagctacttgggaggctgaggcaggagaatcacttgaacctgggaggtggaggatgcagtgagctgagatctcaacattgcactccagcctgggcaataagagcgaaactccatctcaaaaacaaaacaaaacaaaacaaaaaaagactgctaaacaggaagccaaaaatggcaccttatctccgctgaattcacaaacctgcctttagccttgatttatgttatcaagtaaaagctcaataatcggaaaaacatcaataggtacaaaggggagacaactattgcacagattatacgttaggccaatcacactgtagctcctttcttttgatgttctgccttgtgctaatcttccactggattggacatggacgcaaatgatggatacttaatagtctaaaaggcaactggctctgtctgccttggcatgcacaaaatatctgacccaattatttcccagtgtgctgcttgtaaacttgcccaattgctggatgaaaccaacatacctcagagaatcctccaatgcccatgctgcccctcacaatattccagatggattagcttctctccagcttgaggccattcccattgtttggtggttgtctgcatgtttaatggatgggctcagtgctgtacagctacacatgctcatgtatgaatggtgaagtaattaataactgaaattatttctcattttggcatgcctttgtaggctgaatcagaccatggaagtaattattattattattattattattattattattttattttttatttttttttttgagatggagtctcgctctgtcacctaggcttgagtgcagtggcacaatctcggctcactgcaagctccgtctcctgggttcacgccattctcctgcctcagcctccagagtagctgggactacaggtgcccgccaccacgctcggctaatttttgtatttttagtagagacggggtttcaccgtgttagccaggatggtctcgatctcctgacctcgtgatcctcccgccttggcctcccaaagtgctgggattacaggcgtgagccactgtaccccatggaagtaattttatagctgatataaaacacattcttccaaaaactatggaggacttattaaaattttacaccatccttaatcatcagggcaaatgtaaaaatctaaacatacagggcaagaggggctttagggtaatatctgtcagaacacaggatatcaatggccagaagaagaaaatatgagctgacactttgctgggtggaacattatgatgtacccctgcctgccatcaaaataagagccattgtcattcaaaataagaaccatgttttatatataagagctatgaattcatgtaagccatgtcaaacttgacatgtatcagcatttcaaggacaattggaagaccatttctacaggtaaccaccaaggaagatcgtcagagccaattcccaggctccagaaataaatggcatcacaaaatatagataaaaacaaacaaacaaacaaaatgacctgactcaaaataaacaaaggacttgaaataaagttgtttggccaggcaccgtggctcacgcctgtaatcccagcactttgggaggctgaggcaggcggatcacctgaggtcgggagttcgagaccagcctgaccaacatggagaaaccccatctctactaaaaatacaaaaattatccaggcgtggtggcgcatgcctgtaatcccagctactcaggaagctgaggcaggagaatcgcttgaacctgggaagcggaggttgcggtgagccgagatcatgccattgaactccagcctgggcaataagagcgaaactccgtctcaaaaaggaaaataaataaataaacaaagttgttcaaagaagttatataaatgacaattatgtacatgaaatgatggtcaccatcattgatcgttaaggaaatgcaaatcaaaaccacaatgaaattccaattcacacccattagcatggctattatacagccaatgtgggagaagacggaagaaatggcaactcttttgcattgctggggagaatgttaaatactgcagccactgtgtaaaacaggataagtattcctgacaaaggtgaacttagaatttctctgtaacccagccattcaactcctaagtatacacccaaataaatagaaatcagaaacacacatggacacacgtaacccaatttcatggcagccttattcacaattcccaaaacagtattgtggatataacccatacgttcatcagcctatgagtgaagaagcaaagtgtggtttacccataaaatagaatgttcaggcataaaaaactgaatcactggtacattctgctgcatggaagaaccttgaaaacattttgctaagtgaaataagtcagacacagaaggacaaatattgtaggcttttacttagaatacctagaatagtcaaattcatggagcaaaaaagtagaagagagattatcagggcctgacaataaggtggaatgaggagttcttttatttactgggtgatgagtttctatgtggagtgatgaaaagttctggagatagctgcagtggtcacactgagtcataaatgtatttagtgctactgaattgcacacgcggttgctcacacctgcaatcccagcactttgggaggccaaggcgggcagatcatgaggtcaggagatcgagaccatcctggccaacatggtgaaaccccgtctctactaaaaatacaaaaattagccgggcgtggtggtgggtgcctgtaatcccagctactcaggaggctgaggcaggagaatctcttgaacctgggaggcagaggttgcagtaagttgaggtcgcgccactgcactccagcctggctacagagtgagactcctcctcaaaaaaaaaaaaaaacatttcaatggcaaattttatgttagtatgtgttacttcaacacaatttataaatgaaagacaagacacaattccagttattagagatgaacgtaactatatctgggataaaaacatacactggataggactgtgcatattggtatctacctgtagctactctggagtctgaggtggcaagatcacttgaacttaggaattaaaatccaactgtggcaacatagccagacctcacctctaaagagaataataataaaataataataatacactggctgaagccacatatggtggttcatttctgtaattccagctacttgggaggatggtgtgggaggatcccttcaggccaggagttcaagacctgcctgggccacatagtgagaccttgtctctaaataaattttaaaacttagtacagtgtggtggtgcatgcctgttgtcccagcaacttgaaggctgaagtgggaggatcacctgagcccaggaatttgatgcttcagtgagcatgatcacatcactgcataccagcctgggtgagagagcaagaccacaacttaaaaaaaaaaaaaaaaccagagagagagagaatagcagtagaaagtatttaaaatgaaacaccaatcaaaaaaatgaccaaaaaatatgaacagaacatcagtgagctgtgtggtggtgactacacagctacaagtaacctttttttttgagacagagtctcactctgtcgccaggctggagtgcagtggcgtgatcttggctcactgcaccctccgccttccaggttcaagcagttctctgcctcagcctcctgagtaactggaattacaggtgcccaccaccacacctggctaatttttgtatttttggtagagacagggtttcaccatcttggccaggctggtcttgaattcttggcctcatgatccacctgcctcgggctcccaaagtgctgggattacaggcgtgaaccaccgcacctggccaacatgtaacttttaaaaaatgatcagaggccgggtgtggctcacgcctgtaatcccagaactttgggaggccaaagcaggtggatcacctgaggtcaggagttcaagaccagcctgactgacatggtgaaaccccgtctctactaaaaatacaaaattagctgggtgtggtggcacgtgcctgtaatcccagctatttgggaggctgaggcagaagaattgcttgaacccaggaggtggaggttgcagtgagctgagatcacgccattgcactccagcctgggcaacaagacgaaactctgtctcaaaaaaaaaaaaaatcagactgtcaacaatcagttgtgtgatgggacaactacaaggactcctaaaaaggcaggaggaaacatagaataaaaatttttgttaaaaatatatcagccatggccaggtgcagtggctcactgcactttgggaggccaaggcgaacagatcacttaaggccaggagttcgagaccagcctggccaacacggtgaaaccccatctctactaaaaaatacaaaaattagccaggtgtggtggcgcatgcctgtaattccagctactccagaggctgaggcatgataatctcctaaacctgggttgtggaggttgccagtgagctgagattgtgccactgcactccagcctgggtgacagaatgagatgctgtctcaaaaaaaaaaaaaaaaatcagccacacattttccaaattggatgaaaactataaaccttgaaatacaagaagctcaacaaaccacaagcacaaaatgtatgaaaaaaatctacaccaagacacatcatcatcaaactgctgaaagtcagagataatgaaaaaattttaaaactggagaaaaacgacaccttaactatagagacacaaagactgattacatacttatcatcagaaacagtccaaaccagaagaccagagaaaaatttttaagaaactaaaaaaacaaatatgtcaaccaagaattctatattcagcaaatatctttccaaacaaagagaaaataaatactttactcagtcatgctaaaagtgtttgtaatcagcatacttgctgattgtcaattgaattcccagagcagaagaaaaatgttaccagatggaaatctgtgaagaatgaaaagcatcagaaatgctaactacttgagtaaatacaaagaagtttttactactgtctatttttagaataaaagatcactgaatttgtaaaagaaaaaaaagttgggggaaagcatgggaaaaaatgggggaagcatttatcttttggcttacaaacaatccaattttatgctgttaattattttaagtgcataactagattattgttaactataatcatcctgttatgttatcaaacagtaggtattatttaatctttctatttttgtgcccattaactgtccccacctctccatcaccaccccactagtcttcccagcctgtagtaaccatccttctactttctatctccatgagttcaattgttgtgaattttagatccacagatgagtgagaatatgcaatgtttgtatttttgtgcctggcttatttcatttaacataatgatctccagtcacatccatttgttgcaaatgacaggatctcattctgtttttttaagggaaaataaatttattaagaaagtgaaggaataaaacaatggctactccataggtagagcagccttattttttatggctgaataatactccattgtgtatgtgtagcgtattttctttatccatttatctgtttatggacacttaggttccaaatactagctattgtgaacagtgctgcaacaaacatgagagtgtagatgtctcttgaatatactgatttcctttcttttgggtatatacccaacagtgggattgctggatcatatagtagctctatttttcattttttgaggaacctcaaaaatgttctccatagtggttgtactaatttacattcccaccaacagtccatgatggttccctttttctacctcctctccatcatttgttattgcttgtcttttgaatataagccattttaactggagtgagatgatatcacactgtagttttgatttggatttctctgaagatcaatgttgttgagcaccttttcatatgcctgtttaccatttgtatgtcttcttttgaaaatgtcaggctgggccgggtgcagtgggtcatgcctgtaatcccagcacttggggaggccgaggcgggcagatcatgaggtcaggagattgagaccgcagtgaaaccccgtctctactaaaaattaaaaaaaaaaaattagccgggcgcagtggcaggcgcctgtagtcccagctacttgggaggctgaggcaggagaatggcatgaacctgggaggcagagcttgcagtgagccgggatcccaccactgcactccagcctgggtgacagagcgagactctgtctccaaaaaaaaaaaaaaaagaaaatgtcaggctgggtgtggtggctcacacctgtaatcctagcactttgggaggcctaagcgggtggatcacctgaggtcaggagttcaagaccagcctgaccaatatagtgaaacctctactaaaaatacaaaaattagccaggcatggtggcttgcgcctgtagtcccagctacttgggagactgaggcaggagaattgcttgaacctgaaaggcagaggttgcagtgagctgagactgcgccactgcactccagcctgggtgacacagcaagactccatcccaaaaaaaaaaaaaaaaaaaaaaaaggctattcaaatgtttgtcccattttttattggattattagattttttcctatagaactgtttgaatttcttatatgatgtggttattaatctcttaacagatgagtactttgcaaatattttctcccaatctgtgtattgtttcttcactttgtggattgtttcctttactgtgcagaagatttttaacttgatgtaatcccatttgttcatttttgctttggttgcctgtgctcatcaggtattactcaagaaatcttttctcagacctgtgtcttggagagtttcctcattgttttcttgtagtagtttcctagtttgaggtcttagatataagtctttaatccattttgattttatttttgtgtgtggtgaaaggtaggggtctagtttcattcttctgtatataaatatccagtttccacagcaccatttattgaaaaaactgtcttttccacagtgtatgtttttggcacctttgtcaaaaatgagttcactgtgagtgtgtagatttgtttctggattctctattctgttccaatgatctatgtgtctatttttatgccagtaccatgctgtttggattactatagctctgtagtataatttgaagtcacgtgatgtaattcctccagttttattcgtttcacttaggatgacatttgctattctgggtcttttatggtcccatataaattttagaatttttttttctatttctgtgaaaattgtccttggtattttgatagggattgcactgagtctgtagattgctttgggtagtatgaacatcttaaaaatattgatttttccaatccatgaacatggaatatctttgcatttttttggtgtcctcttcaatttctttcatcaatgtttttatagttttcattatagagatctatcacttctttggttaagttcattcctaggtatttaattttatctgtggctattataaatgggattactctttggatttctttttcagattgttctctgttggcatacagaaatgctactgacttttgtatgttgatttttttatcccacaactttactaaatttgttcacagctctaatagttttttatagtctttgggtttttccaaataaaagaacatatcatctgcaaacaaagataattggatttcttcctttgcaatttggatgcccttaatttctttctttctgtctttcttattatctgctccagctaggactttcagtactttgttgaataacagcaatgaaagtggcatctttgtcatgttctagatcttagagaagactcaattttttccccattcagtatgatattagctgtgggtctgtcatatatggcttttattatgttgatatatgttccttctaaacccaattttttgagggcttttatcattaagggatgtttaattttatcaaatgctttttcagtattaattgaaatgattatttgttttttgtccttcattctactgatatgatgtattctgttgattgatttaagtatgtcaaaccaaccttgcatcccaaggataaatcccacttggtcatgatgaataatctttttcatgtattgtagaattcagtttgctagtattttattgaggatttttgcatcaatctgatcagagatattgacctgtagtttctttttctgatgttttttctagttttggtgtcagagtaatactggccttgtagaatgggtttggaagaatttccttctctattttttttggagtttgagtaggactggtattagttcttctttaaatgtttggtagaattcaccagtgaagccactgggttctggcctttttttttttcctgggagaatttttattacagcttcaatctcattacttgttattggtttgttcaggttttgggtttcttcatggttcaatcttggtaggtagtatgtgtctaggaatttgttcatttcttctagattttccaatttattggcatatagttgctatagtagccactaatgatcctttgaatttctgtggtatcagttgtaatgtctccttttccatatcttattttatttatttggatcttctctcttttttcttagtgtgtctaaaagtttgtcaattttgtttaatgtttcaaaaaactaacattttgttttattgatcttttgtgctgttttcatttcaatttcatttatttctgctctgatatttattatttattttgttctactgatattggatttggtttgctcttgcttttctagtttgttaagatgcattttgtttatttgcagtttcacttttttgacttatagtttataaacttatagctataaacttctctgtcagtactgcttttgccatatctcataggttttggtatgttgtgtttccattaggatttttttctagaaagttttcaaattttcttcttaaagtcttttttgactcactggtcattcaggagcatattcttaatttccatttatttgtctagtctccaaaatgcctcattattgatttttagttttattgcattgtggccagagaagatgcttgatactattttaattttttgaatgttttaagacttgttttttgacctaacatatggtctatttttttagaataatccatatgctgagggaaataatgtgtattctgcagccatttgatgaaatgttctgtaaacatctattaggtccatttggtctacagtgcagactaattctgatgtttctttgtgggttttctgtctagaagatctgtccaatattgaaagtggggagttgaagtctccactattattgtattggtgtttatctctctctttagctctaataatatttcccttatatatctgggtgcgccagtgttgggtgcatatgtatttaaaattgttatatcctcttgataaattgatccctttatcattatatagtgaccttctttgtctcattatagtttttgtctggaaatctattttatctgatataagtatatctactcctggtctttttttgtttccattggcatgtcatatctatctttttccactacttgatttgcagtctatatgtgtctttacaggtgaggcatgtttcttgtaggcaacagatcattggattttgcttttttattcatttagccagtctatgtctttttattggagagtttagtccatttacattcaatgttatttttggtaaggatggacttaatcccgccattttttcattcgttttctggtcttctcttccttctttcattttttcctgtcttcctttttgtgaaggtaatttttttctaatggtagaatttaatttcttgctttttgttttttatgtatctgttgtaccttttttaaaatttaaggttaccatgaggcttgcaaacactatcttagaacccattattttaaactgatgacaacttaacagtgattgtataaacaaacaagagaaaagaaaactcatgaaaactctacactgtcccacactttaaaactttttgttgtttctatttatatctactgtactgcccatgtcttaaaaattatagttattattttttgagtgattcatcttttagtttttctacttaagattaggacacacaccacaattacagtattataatattaatattttgtgtttttctatgtacttactactaccagagacttttttctaccttcagaggatttcttattgctcattaacatccttttctttctaacagaaaaactccctttagtatttctggtgggatagtctggtgttcatgaaatcccttagcttttgtttgtcttggaaagcctttgtttcaccttcatgtttgaaggccattttcaccagatatactactttagggtagaagtttttttcttcagcacatttaaaatatggccatgccactgtctcctggcctgtaaggtttcccttaaaaagtcttctgccagacattggaattccattgtgttttatttgtttcttttctcttgatgcttttaggatcctttctttatacttgacctttgggagtttgattattagatgccttgaggtagtcttccttgggttaaaactgcttagtgttctacaaccttcttgtacttggatattgatatctttctctaggtttggaaagctctctgtcattaaatctttgaataaactttctacccctatctctttctcaccctcctctttaaggctaataactcctagatttgcctttttgaggctgtttcctagatctcataggtgtgcttaattcttttttattctttcttttgtctcctctgacagtattttcaaatagcctatcttcaagctcactaattctttcttctgcttgattcattctgctgttaagatgctatgatacattcttcaatatgtcaattgcatttttcagctcaagattcctgcttgattctttttttttttttttcgagacagtctcactctgtcactcaggctggagtgcagtggtgcgatctcggctcactgcaagctccacctcccgggttcacgccattctcctgcctcagcctcctgagtagctgggatcacaggcacccgccaccatgcccagctaattttttgtatttttagtagagacagggtttcaccgtgttagccaggatggtcttgatctcctgacctcgtgatccacctgcctcagcctcccaaagtgctgggattataggcgtgagccactgcacccagcctcatacaagagttttgattaattcacatagttgccagcatttgttattttgttgttcttaggtagtagcaaaataatgaaggtgagggtgtgtggatgtcattgctgttttgatttgcatttccctaaccatgagagagagatgttgaacatctttatgtgattatcaccttttgtatgcttcattagaggaatgtctattcaattccctaacatatttttcaacgtaattgtattttacccagcatgggctgctgaaataaaataccaagtattgagggtattaacccaccaacttttaattctcactgtacaagaaattattaagtaagtccaaggtcaacgtaatggcagattcagtgcctgataagggtctgcttcatggtacaagcaaggctgtcatctcattgagttctcatatggtgaagagcaaaagaaagctacctagggaatcttataagcccattcataagggactaccctcatgatctcatctaattctaactacctccctgagatcccatatcttcattccatacattaggaagtaaggcttcaacacttgaatttcaggagacaaactcaataattttctaccctgcctccccaaatttatatccctacatgcaaaatacatttatttcatttcaacagcatcgaaagtcttgagtcagtccacgattaggtgtaaagcctaaactcaaactccattaaatatcatctgaatcagatatgggtgagagttgaggtaacattcatcctgaggcaacattcttttccaaatgtgagccttagaaaacaaaccggttgtgtgccctagtgttgagacaggcttaggaaaacacttctatttcaaagaagagaaatatgaaaggaggaagtggtgacagttcccaagcaagccaaaaacccagaaggtaaccttcatataagaataatcctctttgggccaggcatggtggctcacgcctgtaatcccagcactttgggaggcggaggcgggcggatcttgaggtcaggagatcgagaccatgctggctaacacggtgaaaccccatctccactaaaaatacaaaaaattagcctggcgtggcggtgggtgcctgtagtcccagctactcgggaggctgaggcaggagaatggcgtgaacccgggaggcggagcttgcagtgagccgagatcgcaccactgcactccagcctgggagacagcgagactccgtctcaaaaaaaaaaaaaaaaaaaaaaaaaaaagaagaagaatcctctttgactcaatattctggaaaagagattggtgggaaaggctctctgacatgatcaaggatgactgaaaaacttacacaaaagcaaagacaaatctttactaacaaggaactcaaaagatcttctgaaatcctctacaatgacaacaataatgacattatgatgatgtagaagatttaaaagatgcagagccattgattgggacctgaacgcattgcagcagtttttcaacaggcagaggtgttaaagattattatcctcaagtaagatccctcagtggagcaaagtctccacctcacctgagtaattacaacatgcctacaaacacagtagatgattcaaagaaataaaggaataagattcttataacaacatttctaactaagcatttgcatatatgaagactgaaccctcagtacttatagatcttcagccctcaagccaaacagatcctgactgtattatttagcctcctccaaagagtcaacatctgcaatcagaaccttgttcttataacatagatgattgttcggatgttctgtcagaagattccatttaacctgatctctcactacgtatctacaataccacatgtctagccacctcaacaaatcacagtgttaggcaccatacagtgatcatcatcactatcactatacctgggtaatcaagagagacaaactaggattttgctgaatattaacatactctttcaggtcaattctcaaaaggaatctgtgtgtattgaaggaaattgtaactttctggctgacatgtactatttagggaggcctgtgatggttgccctgtactgaataagtatagactttttctcaataattccctaagcaatataataactatttacatagtatttacaatgcatgaagtattataaataatctaaaaatgatttacagtgtgcaggaggatgtgcataggttacatgcaactatgtcatttttaaaaagggactttagcatctgtggattcaggtatccttgggaggtgatagaaccaatctcttgaatatatcaagagataactatattcaaaataaatggaaactacttaagtctttataacatctttatattcatagggcttatctccaatgtgaattcttcctcatatcttaaataaaataagattagcgaatgcttctcccacattccatacatttagagggtttctctttagtgagtccttttatgtccattaaagtaagtgggagaactgaatgctttttcacatcccttacattcatacagcttctctccagtgtgaattttttcatgtatacaaagggaactggaaaaactgaaggctttaccaaattgcgtacaatcatggttttgtttccagtgagttctttcatgccttaggagggaaaaggacaaaaacaaaatgctttcttacactccttacgttcatggagtttctttccagtgtgagtcctgtaatgatttcaaaaagaacagacatcgctaaaggctttcccacatttacatttacagtgtttctccccagtgtgtgtccttttatgtctttgtagaaaactggaagaatcaagggctttctcacataccttgcatgtctgagatccatctccggtgtgcgttttcatgtgtctttgaaagcttgtgcatgaaagaaggctttcccacattgcttacatttatagggtttctcttcagtgtgagttctttcatgtctttgaactaaactgagataatgaaagcttttcccacatatcttacatttatgatttctacttccagtgtatgttcttgtgtatatttgaaagcctctgagatgataaaatgcttttacacattgcttaccttcatagggttgttttccagtttgagccttttcaagtatttgagtgtaacagaaaccactgaaggctttcccacattgtttgcatttataaggtttctctccagtgtaagttctttcatgtctttgaaatggtctgtgagaattgaagcctttcccacatatcttacatttatgaggcctatctccactgtgcattctcatgtgtgtttgaaagcttctgagacgattaagtactttctcacattccttacagtcactaagtttctttccagggtaaggcctttaatgtattcaaaggaagtggcaataactggaggctttctcacattgtttatgtgtatgtggcttctctccatattcctgatactcatgtggcttgtgttgagcatgagctctatggtagcaattaagatgaacgacccatgctgacttctccacacacactgctttcacgtggttttgctcaagggagacttttttttttttttgagacggagtttcattcttgttgcccaggctggagtgcaatggctgatcttggctcactgcaacctctgcttcccaggttcaagggattctcctgcctcagcctcccgagtagctgggattacaggcattgtgccaccacgcccggctaattttgtatttttagtagagacggggtttctccatgttggtcaggctggtctcgaactcccaatctcaggtaatctgcctgcctcagcctctcaaagtgctgggattacaggcgtgagccaccgagcccggcctcaagggagatttttgttgttcacaataccacctggaatgtggctgaaagtttctccaaattatctacctcctttacttttacagaatcagtctaccatatgatatctgtaaaaacagagaagtacaattactacaggtttgtttataagtgttttttatatatattaataggtcttaaatttacattgttgacattatcatgcaaagcttaggtgtcatgccctgtttgaacatgaacggactgaatgctgtgcaagataactcaactgtggctatcatcggaacagtaatattcacgtgggaattcttagtactgttttccaaggaaattattttgcagacacacttaacagctatgtcccatttaagtatgtttttgaagaaaattttctaagagtgaataaatttaagccaggattattcttttttatttatttatttatttatttattttgcttgttttaaaattttcctgtctttttttttagacggagtcttgcactttcgcctgagctggagtgcaatggcatgatctcgactgactgcaacgtcctcctcccgggtacatgcgattctcctgcctcagcctcctaagtagctgggactacaggttcacaccaccacgcctggctaattttttgtatctttagtagagacagggtttcactatgttggccagactggtctcgaattcccgacctcctgaactgcgccccacccccccaccctttcaaagtgctggaattataggtgtgaaaaatttcctgtcactttaagaattattccaaagacatatctttctcttcctagggcaaattaccttagatttcttctgggaattttgtactaatctttaatgttttggtcttcccatttcattcctaaaatgtagacccagaagaatcactatatattattataaaattacattgaggccgggggcggtggttcacgcatgtaatcctagcactttgggaggccgaggtgggtggatcgtctgagctcaggagttcgagacaagcttgggcaacacagtgaaaccccgtctctactaaaaaatacaaaaaaatattagccgggcatggcggcgtgcgcctgtagtcccagctactcgggaggctgaggcaggagaatcagttgaacccaggaggcagaagctgcagtgagccaagatcgtgccactacactccagcctgggtgacagagcaagactccatctcaaaaaaaaaataataataaataaaaataaaattatattaaaaatgtaagattttatgtagactgcagttatggatgatttattcaccaaaccacagttgactcttcaacaacacaggtttgaactgcatagatctccttacatacaaattttcttcagtttctgctactactgagacagcaagaccaacccctcctcttattcagcctactcaatgtgaagacaataaggatgataacatttatgatgctccacttctacttaatgaaatagtaaatatagttttttctccttgtgattttctgattaacatttttctctgccttagtttattgtgagaaaacaatatgtaatgcatatgacatataaaatatgtgttaattgaatgtatatcttaccagtaaggtttctggtcaacagtaggctattagtagtcaagttgcgggggagaaaaaagttatttgaagatttgtgactgcattgagggctggtgcccctaatccctgcattgttcaagggtcaaacgtatttcttttatattctaaatctttgaacagcattggtgacgaagaaacaaatattcgtaattgactaagtaaagacatgatgtcccccttacctatacagtctaggttcctgatggtttcccgtagcacatctctgtagagactcttctatgatggacccagcaaagcccactcctcccaggcaaaagatcaaagccacatcctcaaaggccactgagtcctgaaacacccgacacgtgcagaggaggaaagctgaaactgacagcactgggaatctgtactcactacataaatgtcacatgatgctgtggtgtccaaacatttatgcaacgacacggtaatccaactcttaccctctttctaaactcattttctcccagaatgcaattctaatgctagaattaaacgtgtttggtaaaataacagtcgaattataaaatgccactccttggtgagttaaaggagtgacatttattgcctagatcacccctaatatctatgtgtacaggatgtttgtaattcctgatgtgacaaagtcctcctacctaatgggcagaagagttaacatcagctgtcctgagaccgcatattgttacaaatgcttgctcacaaagttgaacctttcactatatctaggaactaaatttagttagggggcttcaccaacataagcgataatggaggatgagtgtccctaaactatgtaaaaaatatggtatctgctgaactcctatgttccctctgagagttcaaacttttgtgatatgcttggcagagggagcatacctgatcattcactactaggttttttgcttgtttttgtttttgtttttgttttttttgagacagagtcttgctctgtctccaggctggagtgcagtggcgcaatctcggctcactgcaacctccgcctcctgggttcaagcgattctcctgcctcagcctcccgagtggctgggattacaggcgcacaccaccatgcccagctaatttttgtatttttagtagagacagggtttcaccatgttggctaggatggtctcgatctcttgacctcgtgatccacccacctcagcctcccaaagtgctgggattacaggagtgagccaccgcgcccggccattcactgctaggtttgaatgtttgtcccctccaaaatgcttgttgaaacataatcgccaatgtggcactaatgaaaggtgaggcctttaagaggtgagtagatcttaagggttcagacctcataaataaattaatccattcatgaattcatggcttactgaattaatgagttatctcaggagtgggactgatggccatattaaaaaagaagggaacctgagctaccacattcagcccattctccatgtgataccttcaaccacctagaaactctgcacagcccccatgaccaagaaggctttcaccacatgaagccctcttacttgctaggttccagaactataataaataattttttttgttgttttttggcttttctttttagatggactcttgctttgttgcccagatgggagtgcagtggcacgatctcggctcactgcaacctctgcctcctcctgggttcaagcaattctcctgtctcagcttccttagtaactgggactacaggtacatgctaccacacttggataatttttgtatttttaatagagacagggtttcactatgttggccaggctggaagaaatattgttttttaaataaattactcagcttctactattctgttataagcaacagaaaacatactaggataagcatgaaaaaaccactcaccactgggtctcttatgagctttttttggtagataacatttcccacattttgtcacaacttgttacttaaaggataaagcccatccaatctgaacacattataggagactatttggaaggtggcatctgctttcctctagaccaaattcagttaagtatgacaaaagactaatgaaagatgtctcactatcccaatgggaaacttacgctttttattgggtaataacaaaggataataaagaaggaaaaagattgcacatgttcactcctgtaatcccaacactttgggaggctgaggcgagtgaatcacctgaggttgggagttcaagaccagcctgaacaacatggagaaaccccatatctactaaaaatacaaaaaattagccgggcatggtggtgcatgcctgtaatcccagttactcgggaggctgagataggagattcgcttgaagaacctgggaggcggaggttgcggtgagccgagatcgcgccattacacgccagcctgggcaacaagagcgaaactccatctcaaaaaaaaaaaaaaaaaaaaaaggaaagaactcaatatcacctctcataaatatctatgctagtccctaaatccctaaaacagttgttttaatagtgaacaaaaattgcattagcaaatctagtaggaatcacaaatgtctaaaagtgagaaaaatgttggaacagaaacatgaaatcttgcctgaaatacataaaggattcaagggtgaaatatgcaagacactatactattaatcgagagataaacaaatagaaataggaatgtgaataatggtaggaaagcctagcagagtttttaaagtttcttcttattctaatctctcctccacttcagtgacagtcttgaggacaacagcctaggttcccagtgtgagatcctggtcactgattctaaagagagcagatcagatttaatgtgcaaattattgcctttgtatgttacaatctgttttgggcctttccaaaggtctcaaacaaggctgtcttctctgtttcatctatgttggaagccaattagaataaacactagcaggaacatcttaaaaattttacgaaaaacataaaaagcctgcaaccacattggactatagattatgattaagacatacactgaccagctaatggccaggaagaaaagctggagagaaaatttccctcagaacttgggatattcaaaagctcccaaattagccatggtggcatgtccctgtaggctcagctatttgggaagcagatgcagaaggatcacttgagcccaggagttcgaggctgtagtgagctataattgtgccactgcactccagcctgggtaacagagcaagaccccatataaataaataaataaataaataaataaataaataaataaataaaattaattaattacttatttaaaataaaataaagcacccagttataggaggtagtttcctgagacctggaagaagaaaaaaaaaaaaagcaccagggtatactgaggaattaagccccatgcagtcaaacgacagaaaaacacattttcacaaaagacccaagaccatcgttttcagatgtggcagatcttgaggcttggttaaacagaaagagaagggtgaagcagagctttaagcagctgggctaaggattcgaggaattctccagctcagatccatccacagagactgacagaggtcaattttttgcttgtttcattttctctttttctttcagtttctggcattgtcagaacactgggtgaatataagctaaagggacagagacctcagtgactacactggacagggaatacagtctctataaatacacttctgaaataaacaagattaccaaacaaataagcaattacagccttcagcgaacataaatcgcataaaaaagaagggggagaatttgatttacagagttactcttattataatattcaaatgtctagttttaacctttattttaggttccagggtacatatgcagtttttttatatagacaaacttgtgtcatgggagtttggtgtatagattatttcatcacccaggtactaagcatgatacttgatagttattttttcttatccttttcttcctcccacccttaagtatgcctcagcgtctgttgttcccttctttgtgttcacatgttcccattatgtaactcccacttattaagtgagaatatgtgatatttggttttctgttcctgtgttagtttgttaaggataatagcctccatctccatccatgtttctgcaaaggcatgatcttgttcttttttatggctgcatagtatttcttggtgtatatgtgccaaatgtgctttattcagtctactgttaacaggcatttaggttgatttcatatatttgctattgtgagtagtgctgcaatgaacataggtgtgcatgtgtctttatggtagaatgatccatattcctttgggtatgtggatccaataccccagtaaatgggtattggattgctgggtcaaacggtaattcagtttttagtgctttgaggaatcaccacgctgctttccataatggttgaactaacttaaactcccaccagcagagtataagcattcccttttctccacaaccttcccagcatctgttattttttgactttttattaatggccattctaactggtgtgaaatggtatctcattgtggttttgatgtgcatttctctaatgattagtgatattgggcattttttttttcatttgcttgttgattacatgcatgtcttcttttgaaaagtgtctttaatccatcttgagttgatttttgtatatggtttaagaaaggggttcagtttcaatcttttgcatatggctagccagttatcccagcaccattgatgagtccttccccactgcttgtttttgtcagctttgtgaaagatcagatggttgaaggtgagcagcattatttctaggctctctattctgttccattggtaatgtgtcagtttttgtaaaaataccttactgtagccctgtagtatatagtttgaagtctggtagcatgatgcctccagctttgttctttttgcttaggattgccttgactatttgggactttttaagttatttttttccaagaactaagtcttgcatttgctaatcttttgtatgtttttttttttttttgtatctcaatttccttcagtttagctctgattttggtcattttagctctgattttggtcatttcttgtcttctgctagctttgggattggtttgctcttgcttctctagttcttctagttgtgatattgggttattaatttcagatctttctttttgatttgggcagttagtgctataaatttccatcttaacacttctttagctgtgccccagagattctggtatgttgtatctttcttctcagtttccaagaatttcttgattttggtgttaatttcattatttactcagaagtcattctgaaccaggtcatttaattttgatataattgtatggtttggggagattttcttagtcttgatttctatttttattgcactgtggtctgagagtgcagttggtatgattttgtttgcttgtttttttaatttgctgagggttattttatgtctgattatgttactgattttagagtatgtgccatgtggtgaggagaagaatgtataatctgttggttttgggtggaaagttctgtagatgtcatatccatttggtcaggtgttggtggaaggctaaggaggagcaaaggcaaatgttacatggcggcaggcaagagagcatgtacagggaaactgccctttataaagccatcagatttcatgagacttattcactatcacgagaacagcatgggaaaaccgcctccatgattcaattacctcccactggatcactcccatgacatgtggggattatgggagctgcaattcaaaatgagatttgggtgagtaagtctcatgagatccgatggctttataaagggcagttcccctgcacacgctctcttgcctgccgccatgtaacatttgcttttgctcctcctttgccttccaccatgattgtgaggcctccccagccatgctgaactgtgagtcaattaaacctctttttcttcgtatcaccatgggtgccagctcccagttaataacgctttttttttgtttgtttttaaatagagatgggggtttcaccacattgcccaggccggtcttgagctcctgagctcaagcaatccacccacctcagcctcccaaagtggtgggattgcaggcatgagccacggtgcctggcctcataatgcttttatatctggtattcttcataaaaatatgaagatgaatgttttcaaattcaaagtctaatgtctcagcctttgattgaagcatttaattcaataacatttataggcttgatggaaggagcatttccacgctgtgtttaggagacaggagggcaaattgaactcccagagttaaatccattagtgcccctgactcatccccaggttctgatccaccctagggctccatttcaggaattatcgtctggcctccaagctttggaatatgtttggcctcctgaaagtggttgacttgtgaactgtgtgtggatgcagcaggctgcttatctgagctagttcaagtttttgctttataaaatattgccgccatataattccagtttttccacacatttaacaattttatttatttcttttttcttttttctttttttttttttttgagacggagtctccctctgtctcgcccactctctcactgcagcctctgccttccaggttcaagtgattcctctgtctcagcctcctgagtagctgggactacaggcgtgcgccaccacatccggctaatctttgtattttagagacgggatttcaccatgttggccagactggtctcgaatttctgacctcaggtgatccacctgcctcagcctcccaaagtgctgggattacaggtgtgagccaccacgcccggctttgttggggtgtttttatattctgcactgaaaattagtagattgagacataaggtgggagaaaggcttggcctgtgcagccaacagcctcatccaaaactcctgattcctggaggacatcagcccctcccttctgctgcagtgtggcctgggctcccttcctgctctcaaatcaggggatagctccactggacagtgagtctggaatttcctgcacagacttgtgggtccctgtccaagaggaaaaaggaggaaggtcaggacatactgcctaaatgcaaatgtcccctgggagggggtcaggtcacagcgcagggaggaagctagtcctctcaaggcctgtctggaatctgtttatcaggttccactccgctgcccgagatcgcttcttccgttactcagtgcccgggggagggacctggcgcactatccaatcagggccgcggggcggggtcgtgagaactgtcaatcaggcgcactgaccggaggagggtgcaaggttcaaagagcccgccgagtcttctccacgcccctgcactgggctccgggttctgtcactgagagacgccctggaacgtctgtggcagcttctgtctcgctgggacccgcactgacagcgggaggcagagggaggaacctggacgccggaagccgggaaatggtgagtgtgtgaggtctggtgtcccgacgcgtgagaggagagactggttggaaccggccggaaccggctgtggtggcaccaggtcttccccgccggcgacaccctggcgcagctcggccctcggttccctcggccgcacgatggggctggggcggcagccgggaccccgggcgtcctgtcccgtccctgcgcggccactgcggccctggccctggaggcctgtctgggcagctccgcgcccgcagtcctgcgtctccccagattgtgcggctgtaaccggcacaggttcgcggcccgagtcactgcaccgagacgccgagggctgcagcagaaacagtttaatagggggagaggggaggacaccccagatccgccttcctgagaggtttggggatggggtgtttaggggtgtggacaggggcggctggggcgtggggtcgctggatggtggggaagtgaggggtgactcttgggactggaggtgaagaaaccgcattcttctgctgagtgggttcccttgtggggtcttcagcctggttggcgccagcctttccgctggaattcaggatctgagaaagaactcaggcgactcttgagcaactctcagagatctcatccccaagcacaatggcgaagccggcggtcagcatctgctgtggcctgactcttggggaggcggccccgcgaggcagcggggctgagggcacctggttaatatctaactgcaatctcgcctccagcctggctcgcagttctgtgaacccggtgaggaggctgcacggtgatgacaggtcaccaggcagactcgtgtgtggggtttgtgtgtgggaggagttgtggtctgtgtggtcccctgtcccttctttcttcccaagggtgacccgttcgccttcgagtcttccaaagatgtgggcagcagggtctcaagtccaccactgtgttctctcatcctaactcctcctagggccgacagaaaatcccttggcttccagagccttcctcaggctttctctcctcaattcacagcaactttatgaactccttgtcccccagtttatttttcaaacagaggctagtattttaattgtcattttgtttatacatagcaatatatggctctttgtaaaaggttttgtgtttgtgaacatttcacatgagaggaagcagagaaaaaccaccagacatttcgctgtaaaaaaaatgaatattaataaataaaatctttgttactgtcctcccttcatcatccctagacagagacaccttttgagaatgtctttggattaagtttcctctttggaaacgttacagagtgatgagtccccagcccatcctctatggtttcctggtcctgggtttcagagctgcctggggccaccccaagatgcccacagctgccaagtctcttgtagtgtcaagtgaatatcagtccctttgtcactcctcccagaggacaccctgaggtggagatggtgggaccttgtagggaagcagcatgatgccctgtagtgggaggagtctcctggtatacccttcctcaataagctacttccttagaacactcagcttttcttcccccatcccttccttggggatatatggctggtcagccaattggatggtggtattaaggggacaggactgaaatgattcttcccttctgatgttctcagactaatgaagggagaaaactatccctaaggacaggaaaaccaactccactgaggtggtgcaagaacctgaaaagctaacaatgtagtgtctcctgggatcatggttattgagcacttcggtgagcagcatggtgatgggggatgttccaggtgataggaggacctgacttgacacactctgcacccatagggaggtggtgaaaggagatgatggtataagggatgcatatggatcaaccaaattgaagaactgggagaagatagagaactagaaactgtgtcaagggtcataaaaccccttttttggtatggaaaaacgaaaccacactcaaaatggaagctgaggtaacaaactgagtaaaaattaatgaaaactggaaagtctatagttagttgatcattgtatatggagatgctgggcagaagatggattattctcctgtaggtaaccatttgtctccatcatttctgttgaagtgtccctcatttgtatcactgcctggcaatacctgctgtgtcataggttcttgtaccttaagtagatgctcttgttccagaatttgccatttttcattggtttatgtatccatcagtctgctaatatcatactctcctgattactatagtcttcaaagccttgatgtgtggtagagaaagacccttcctaacttagtcctttgggttgctataacaaatttaccatagactgcatgccttacacaacagatattcatttctcaaagctataaaggctgagaattcagtttcaagcagcaggtcagttgtctactaaaggactctttttttttttattttttatttttgagatggagtcttgctctgttgcccaggctggagaacagtggcatgatctcagctcactgcaacctccgcctcctgggttcaagtgattctcctgcctcagcttcccaagtagctgggactacaggcacatgccaccaccccagctaattttttgtatttttagtagagacggtgtttcaccatgttagccaagatggtctcgatctcctgacctcatgatctgcccacctcggcctcccaaagtgctgggattacaggtgtgagccaccgtgcccagcctgggcctctttcttgatttgcagatggcattcttcctgttatgccctcacatggtggagatatgtctgtaatgtctgtctagttttggtgttaaggcagttgtattagtccattttcacactgctataaagaactaccagaaaagaggtttaattgactcacagttcctcatggctggggaggcctcaggaaacttacaattgtggcggaaggggaagcaggcacttcttacatggtggcaggcaagacagcatgtgaaagaggaactgtcaaacacttataaaaccgtcagatttcatgagaacccactatcacaagaacagcgtgggggaaaccgcccccatgatccagtcacctcccacaggtccttcccttgatacatggggattatggggattacagttgaagattagatttgggtggtgacaaagagccaaaccatattatcagtgttggccttacaacatgaattagaaagtgttccctctgcttgtattttctgaaagagattatagagaattggtgtcatttcttccataagtgttttccagaattcaacagtgaaaccatgctggcctgttcctttttcttgggactttttgtttgtttgtttgcttgaagtggagttttgctttgttgtccaggctaaagtgcagtatcatgatctcactgcaacttctgctccctgggatcaagtgatcctcccacctcagcctcctgagtggctggaactcccactacagcctcctgagtggctggatgtgccaccccatcctgctaattttttgtgttttctgtagagatggggtttcaccatgttgccgaggctggtcttgaactcctgggctcaagcagtctgctgatcttggcctcccaaagtgctgggattacatgtgtgagccaccacgcctagcctaccactgcactatagcctgggtgacagaacaaaactctgtttcaaaaaaaaaaaaaaaaattgaatgcaatctctagaaagcaaagatatataaccaatgcttaaaaaccttccactttaggaaactaaagaaagaatagcaggatacatgtaaatcgagcagaggaaaataacaatgagagaaggtattaatgaaatagtaagcaagaaatcagtagaaaacattaacaaaccaaaagctggttccttcaaaagatcaataaaatgaataagcccataggcaagctaactcagaagaaaggggggttatgattactcatcttgtgtacattaaaggacctcaaaggagtattaggaacaactgcatgcccacatagttgataaattacatggaatggaccaattccttgaatgacacaagctaccaaaactcacaaaaggagaactaattaatatgaaaaggcttataactattgaagaaattcaatcaataaataataaaagtcccaggctgtgggcagcaagccacccaggcgccgaggcaagagaccgaggacacgagctgttccagtataataaaatataaaacaagaatagttataccagatatagatcttagatatgattatatatgaatatcattaatcattagttggcagtaattactctttattccaatattataataatcctcactctataatcataacctacgaaaaaccaggccatacagagataggagctgaggggacatagtgaggtgtgaccagaagacaagtgtgagccttctgttatgcctggacagggccaccagggggctccttggtctagcagtgacgccagcgtctgggaagacgcccgttgccaggcggtccgtggtctagcggtagcaaaaagtgtcaaggaacacccactacttagcagaccgggaaagggagtctccttttccccgggggagtttagagaagactgctcctccacctcttgtggagggcctgacatcagtcaggtttgtccgcagttacctggaggcgtaaccatctccctgtcatgctgtgcttcagtggtcacactcctagtctgccttcatgttccatcctgtacacctggctctgccttctagatagcggtagtaaattagtgaaagtactaaaagtctctgatatgcagaaataatggcgtaagctgtctttctctctgtctcctctccctctctgccttggctgccaggcagggaagggcccccgtccagtggacatgtgacccacgtgaccttacctatcattggagatgactcacactctaccctgccccttttgcttttgtatccaataaataacagtgcaaccagacatttggggccactactggtctccgcacattggtggtagtggtccccgggcccagctgtcatttcttttatctctttgtcttgtgtctttatttctacgctctctcgtcaccgcacatggggagaaactcaccgaccctgtggggctggtccctacaccaggccaggctgggtgcactggtaggctaggcatggtggctcacatgtgtaatcccagcacttttagctgctagcattcaggaaatctatcagaatactggatgaacacaagctaagggaacagagacttcagtgactacactggacagagaatacagtctctgcaaacatactctgaaaatgttactaaacaaatgaataattaaaaccttccacaatcccagcactttgggagaccaagattggcagactgcttgaacccaggagttcaagaccagcctgggcaacatggtgaaaccccatctctacagaaaacacaaaaaattagcaggatggggtggcacatccagccactcaggaggctgtagtgggagttccagccactcaggaagctgaggtgggaggatcacttgatcccaggaagtagaagttgcagtgagataataacactgcacttcagcctggacaacaaagcaaaactcctcctgggttcacaccattctcctgcctagctcccgagtagctggaactacaggcgcctgccaccacgcccgactaattttttgtatttttagtagagacagggtttcaccttgttaacgaggatagtctcaatctcctgacctcgtgattcgcccgcctcggcctcccaaagtgctgggattacaggtgtgagccactgcgcccggcctgctttcaattctttacatttccttctaagcacattctaaaaattttgctatgatatactctttttttatcaacattgcaatatttacatttgcttgagaattctctttgacgcttttatagttgagaggcttgtcacttaaatctccaggtttttaggcttttcaagtatgtttctgttatttattgctactttaattataatatagtttgatcgcatattttatagaatttctatttttaaaaatgtgttcaagtgtgttttatgattcagaatatggtctatcttggtatatacttcatgagggcttgaaaataatgtgtagcctgctggtgtaaaatgaaagaatctgtaaatacacatcaattaaatctagttgattaatagtattcttgagttcacatgtatcattagtgattttctgccaaactgatctgtcaattattgaaagaggtgagttgtttttctccaactatagttgtagatttgtgtattttgtcatgtggttttataagtttttgccttatgtattttcatgatctgtgtttatgggcataaatgttaaggattattatgtcttgtaggattgatctctttatcattatgaaatatctccatcgtgtgtaatttttttgacctaaaatcttatttgtctgaatttagtatcagtgttccatatttcttttgattagggctagaattgcatatatttatccaaacctttctatttaaaatggttttcttgtgcacatcgatgggccttctttttcattatactctgccagtccctgccttttttactgttgaatataggtaatacacattctatgtcataactgatgtaattggattaatatcacatatatgttattgttttccatttattgtacattatctgtttttttccactttctcctttctgccttctttcattttgactgagcatgtatatgattccatttgcttgcttctatgagtatagtaaatctctttgtttcttaaatgttattagtgaattcactagagttggtagaatactattcacaactaatgagcctacagtttcaaataacactataccggcttcaggggtagtgctgatataacaaagtattctgaattcctctattgtattgcccaatacattgctgatattattatgttgaacaaacctgtatctattatattagatcagataggtataagaaaactaaagaatttcaaatgtcttcatttaattctaagagtcttcgtgtgtgggtgtgtgatccaaatttctaatctatttaatttttcttctctccgatgaacttcttttaacattactagcaagacagttgtatcaatcatacattctatcaatttcattccttttttttctccttagtctaaataacttcaattgttctatcttcattttagctgattttttactttggttgctcacatctgttgaacatctatagagaaattttcattttagatgttgtgctttgcagttgcataaattaaatatggtccaatttctaattttgtattgatatgattttattcatacatcccttttctggttttcttttagttctttgttcataattgcctttacctcattgaacatatttaagacagttgctttaaagtttttattcaataagtctaatgtctgaggttctcagagatggtttatctaaattaaattttttttccattgatgagctatatttttattcttctttatagtctttatggattttttgtgttgtaaagcagacatttgaatgttataatctggaaatcagattcccttcactgtttgcccttctggtttgtggaaggttttaattattcatttgtttagtaacattttcagagcatgtctgcagagactgtgttctctgtccagtgtagtcactgaagtctctgttcccttagcttgtgttcatccagtattctgatagatttcctgaatgctagcagctaaaagtaaaaaagacatgccaaacaaaaagctgacctcttccagtctttgtggatgggtctgtgatgtagtatttggtgaacacttagccagactgcttaaaactctgctttagccttacctttctgttttaccaaactgagagatgatgcagagctgaaaatgagggcctccccaggtcttttgtgaaaatgtgttttttccagtgcatgcatttccagtacatgcattctcaattccccaaaacactggagtgcttttgaatgcccccttttttttgagatggagtctcgcgctgtcgcccaggctggggtgcagtggggcaatctcagctcactgcaagctccgcctcctgagttaatgccattctcctgcctcagcctcccgagtacctgggactacaggtgcccaccaccacgcccggctaattttttgtatttttagtagagacggggtttcaccgtgttagctaggatggtctcgatctcctgacctcgtgatccgcccacctcggcctcccaaagtgctgggattacaggcatgagccaccgcgcccagcctttttttttttttttttgtgacggaatcttgctttatcgcccaggctggagtgcagtggctcaatctcggctcactgcaacctccgattcgcaggttcaagcgattcttgtccctaagcctctcgagtagctggaactacaggtgcccgccaccacacctgactaatttttgtattcttagtagagacggggtttcgacatgttgaccaggctggtctcaaactccagacctcaggtgatccacctgcctcagcctcccaaagtgctgggattacaaacgtgagccaccacgctcagcctgaatgccctaatttctgagggaaattgttctctccttttttattcccaggacttagatgttctaccatatgtcttaatcataatttgttgtcccagttgtttgaaggttttttatgtattttgcaacaatttgaagcagttcctgccaagcttgacctaattaggctccatcattgattaaataaaaaagagaactttctttcagacctttggatagtccacagatggattgaaaaatacaaaggtgcaataacttacaaataagatctgatctgctctctctagggatccacattggaaatttggtctgctgttttcaagactggtgctgatgtgaggagggattgggacaaggacaaataaaaactccacaaaactttcctactatttgtcaccttccttattctatttgtttatctctgtgttaatagtacagggtactgaatataatatattcaccatactttatctgtttttggaaagctgttgctttcttggttagaaggattttagcatttttagatgtttgtgacttctattagatttggtcatgtaatttttaatgatgacaaaaaggtctgtttagggatttagggaaatattatagatattcatgagagatgacattgagtttttttctaagaacatatgcaatcttggcccttcttttcttctttgacattacttaataaagtttaatttttccattgggatggtaaaatatccttattagtcttttgtcatacttaactacatatgttctacagtaaaccagttgctagcttccaaatgttctctcttagtgtagtcacatagcacaggctaaatcccccaaggcacaagggtcactcattacagacacagtgaccagagtgttttttccctttttttttttttgaggcggagtttctctcttgttgcccaggctggagtgcaatggcgcaatctcggctcaccgcaaccttcgcctcccgggttcaagcaattctcctgccgcagcctcctgagtagctgggattacaagcatgaaccaccataccgggctaattttttgtatttttagtagagacagtgtttctccctgttggtcaggctggtctcgaactcctgacctcaggtgatctgcctgccgcggccttccaaagtgctgggattacaggtgtgtgccactgtgcctggcctcagagtgtttttttcatggcttagtctgttttttgttgcttataacagaatactttaacctgggtaatttataagaaatgatatttattttttacacttctggagggtgggaagcccagcatcaaggctgggcatctggtgagagccttcttgctggtaactctcttttgcacaataggtagtaggactttgtcatgacaagaactgcagacccactgtagaaatagaaatgaggagtgattcaggcaataagactcactttcttaacttaccaacaagaggcgtgttcctattcaactgttactttacaaaacatgttcatttctaggatcagaattgtgtgggataaaatgagtgtaaagagagaataagagtgggtttaccatgttcttgaataaatgcttggaaaccacagcatcatgtgaaggttatgaagtgaatttacattcccagtgccttcagttttaatattcctcctctgcacatgtgaaatatttcaggactcagtggcatttgaggatgtggctataaacttcacctgtgaggagtgggctttgctgggtccatcacagaagagtctctacagagatgtgatgcaggaaaccatcagaaacctggactgtataggtaaggatgtcatcatgtcttcacttagtcaattagagacatttgtttcttggtcatcaatgctgttcaattatttgaaatatggaagggtatataattggcccttgaaccagccacccaagcagtcatacatcttctcccgcacaacttaaccactagtagcctactgtttactggcagcattactggtaacataaacagttgattaatacatgtattatatgtcatatgtattacatgctatatattctcacaggaaagtaagctagaaaaggaaaatattcattaggaaaccataggtaagtggaacattatttagtattcatagaaaatacaacattacaaagttttcattctgattgtctttacattgagtagactgaataagaggaggggttggtcttgctgtctcaagagtagcagagactgaagaaattcatatgtaagtagacctgtgcagttcaaacctgtgttgaagactcagctgtagtttggtgtgtgaatcatgcatgattgtagtgtacataaaatcttacagtctttctataattttataataatttatagtcatttttctggttctaacttttaggaatgatatggcaaaatcatgatatagaagaagatcagtacaaagatctcagaagaaatctaaggtaatttgcactcacaagagaaagctgtgtccttgaagtgattcatagtatgccagaaattttattttattttgtttgttttagagacagtgtctcactttgttgctcaggctggagtacagtggtatgatcatagctcgctgtagcctcggactcctgtgctcaatggtcctcccatttcaacctcctgagtagctagggttacaggcatgcaccaccacatgtggctacatatttagtttttgtagagatagagtcttgctgtgtttgaccagactcatctccagctcctgtccttaagcgttcctcctgccttggcctctcaaaaggcaggtattgcaggcatgagccactgtgaccagcccaaaattttaaaaagaagcaaggaaaattaacaagcccaccttaaatttatttattcttagaaaattttcttcaaaaacatatacttaaatgtgacatggctatggctattcagtgcctgcaaaatagttcccttggaaacagtattaagaattcccatatgaatgtcactatcttcaaaacagctggggttgagttaccttgtacatcattctgtccattcatgttcaaagagggcatgagacctacactttgcatgataatgttagaaatgtaaatccaggccaggtgcgatagctcacacctgtaatcccaactatttgggaagctgaggcaggaagactgcttgagcccaggtgttcaatcagcctgggcaacgtggcaagacgccctttctacaaaaaatacaaaaattagctaggcatggtggcctgtgcttgtggtttcagttacttgggaggctgagacaggaaggttgcttgagcccaggaggtcaaagccgcagtaagccctgttcacattactatactccagcctgggcaacagagcaaaacccagtttcaaaaaaaaaaaaaaaaaaagaaaaagaaaaagaaaggctgggtatggtggctcacccttgtaatcccagcactacaagaggtcaaggtgggcagattgcttgagctcaggagttcaagactagcctgggcaacatggtgaaacctcgtctctataaaaaatacaaaaatctaatctcagcattttgggaggctgaggtgggcagatcacgaggtcaggagatcgagaccatcctggctaacatggtgaaaccccgtctctactaaaaatacaaaaaattagccaggtgtggtggcaggcgcctgtggtcccagctacttgggaggctgaggcaggagaatggtgtgaacccgggggaggtagagcttgcagtgagccgagattgcgccactgcactccagcctgggcaacagagcgagactccgtctcaaaaaaaaaaaaaaatcagccatgtgtggtggcttatgcctgtagacccagctatttgagaggctggggtgggaggatggtttgagtccgggaggtggaggttgcagtgagctgagatcacaccactacactccagcctgggcaacagagcgagaacctgtctcagaaaaaaaaaagaaaagaaagaaagaaaagaaatgtaaatccaatacttattaatacaaaatcatttataaacaaacctttactaatgtacttcttattttttacagatgtcatatggtagagagagcctgtgaaattaaagataatagtcaatgtggaggaccctttacccagactcaagacagtattgtgaacgagaaaatacctggagtagatccatgggaaagcagtgagtgtacagacgtcctcatgggtcgttcatctcttaattgctacgttagagttgacagtgaacacaaaccatgtgagtatcaagaatatggagagaagccatatacacatacacaatgtgggacagctttcagttatcagccctgctttcaaatacatgaaagacctcagcatggaaagaaactctatgattgtaaggaatgtgcaagcttcagttctcttgaaaaccttcaaagacacatggcagcacaccatggagatggacctcgtatatgtaagttgtgtggaaacgcctttatttggcctagtttatttcatatgcttagaagaactcacactgaagagaaaccatatgaatatgagcagtgttctacagcgtttcctgcttatagttccactctaagacatgaaagaacacacagtggagagaaaccctatcaatgtaaacaatgtgggaaagccttcagttgttcctgttacactcaactatatgaaaggactcacactggagaacaatcctatgaatgtaagcaatgtgggaaagcattttatcatcttggaagctttcaaagacacatgatagtgcacactggagatgggcctcataaatgtaagatatgtggaaaaggctttctttctcccagttcagttcgaagacataaaagaactcacactggagagaaaccgtatgaatgtaagtattgtgggaaagcattctctgattgcacaggttttcgaagacacatgataacgcacactggagatggacctcataaatgcaaggtatgtgggaaagcctttgattctcccagtttatgtcgaaggcatgaaacaactcatactggggagaaaccctataaatgtgaatgtgggaaagcctttagtgatttctattactttcgaaatcatgaaactactcacactggagagaagccatataaatgtaaacaatgtggaaaagccttcatttgttgcacttaccttcaaatacatgaaagaattcacactggggagagaccctataaatgtaaacaatgcggaaaagccttcaggtcttccaattacattcgagtacatgaaaagactcacactggagaaaagccctatgaatgtaagcagtgtggaaaagcactttctcatctgaaaagctttcagagacacatgataatgcacactggagatggacctcataaatgtaagatatgtgggaaaagctttgattctcccagttcatttcgaagacatgaaagaattcacactggggagagaccctataagtgtaaactatgtgggaaaggcttcaggtcttccagttacattcaactacatgaaaggactcacactggagagaaaccctatggttgtcagcaatgtgggaaagcattatctgatctctcaagctttcgaagacacatgataacacatactggaaatggacctcataaatgtaagatatgtgggaaaggctttgattatcccagttcagtgcaaagacatgaaagaactcacactggagagaaaccctatgaatgcaaggaatgtggtaaagccttcagtcattcaagttacttacgaatacacgaaagagttcatactggagagaagccgtataaatgtaaggaatgtgggaaaccattccattgtcccagtgcctttcataaacatgaaaggacccacagtatggagaaaccctataagtgtaaagaatgtggggaagcatttcattgtatcagttcctttcataaacatgaaatgactcactagagaaaacccctatgagtgttgaacatgtgagaaagccttaagtactttcagcttcttacaaatacataagagactcacactgaaaaaagttgtatgaatataaaaatgtactaaaaccttccatttttttcagtaccttttgaaaacatgaccaaactcatacttcaaaaatatatatataatgaatgtgaggaatatgaaaaaactttctttgtctagcaaactttcaaaggtggttattataacatactagcaatggaccttactactgtaaggaatgtagaaatgcatttactagtcctaattcatttcagttacatgaaagatttcaaactgcagagaaccactatgaatgtaaacaatgtggtaaagcatttagtagcttcagtttcttttgaatacagtcttctctagtttctgaggtgaattgattccagcaccctcaggaatacctatattcagagatattcaagtccctgatattaaaaacagcatatttgcatataatctaggcacatttttctgtatatcttaaatcatttctagattacttataatacacaatgcattgtaaattctgtataagttgcttttgtattatttagggaatcatgacaagaaaaaagtctacatgttcagtacaaatacaactgtcattcattgtcctaagtacgtgtacatgtcagcaacaatgtcaggatctgtggagtttgcgagtataagatctttaagtgttgaaggtttcatctccataattgcagctgctttagctacaaatattataggaagctgttccttctttttctttacatcaccaaaccttccagtggttataggcattttgttatccttcaagtgacctggagcctttgttgcatgacaggattgtacctgaagatcacattctttaacaattggacctactgaatctgtaaaactactagaagaaaacatattgaaaatacttcaggacattggtttaggcaaagattttatggctaatacctcaaagcacagacaacaaagataaaaatagacaaatgagactatcttacactaaaaagtagctgtgcaaagtaaagggaacaacaagagtgcagagaaaacctgttgaatatgagagaatatttgcaaactatgcgacaagggactaatatccaaatatacaaggaactcaaacatctcaacagcaaaaaatataaataatcccattaaagtgggaaaaggatgtgaacagacagttctcaaaagaagacatgcaaatggccaaaaagtatatggaaatatgttcaacatcactaatgattaggaaaatgcaaattgaaaccacaatgagatactctacttagaattgttcttactaaaaaagataaaaaacaacaaatgctgatgaggatgtggagaaaagaaaactttcactgttggtgaaagtataaattagaacaactactgtggaaaacagtatgtagatttctcaaaaacctaaaaatagaaccaccacatgatccagcaaaccaagtataaccacaggaaaagaaatcagtatatcaaagagatacttgcacttgcatatttatcacagcactattcatgataacaaagatatggaattaacctaagcatccatcagtggacacagggataaagaaaatgtttatgtacacagtggaatactatttggccataaaaaagagtaaaatgttattgctaacaacatggatggaacttgaggtcattatggtaagtgaaataagccaggcacagaaagacaaataccacatgttctcacttatatgtgggaggtgaaaaacttcacctcatggagatagggaatagaataagttatccggggctgagaaggggaaatgaagagaaattggtgaatatgtacaaatttccatttagatcaaaggaataagttctgatgttagaaagcatactagagtgaactatagttagcaaaaatatattgcatatttcaaagtagttggaagagaggacttgaaatgttaccaacacatagaagtggtaaatactcaagatcatggataccccaaatacgctgacttgaccattacacattctatgcatgcaagaaatgctcatgtgtaccttatatatatgtaaaatatgtatcaataaaagaaaatatataagatagttttaaaataacactattgtcaggtgtctgtgggctgaggaacagcctaaggtgtaaacttaagttcttctcaggtcttttcttagttgcacctgtccctgggcatgtgtggtaactgtctaattttctctgcatgtatggttatttttgcacaacctaatcttcagtggctctcaaaaggagaggaataaaagcattaagggaaaaataaaaggcaccagcctggaagtcacttcagatggaggggaagggccttcaaaaaatggagagagatgcagcagcaacagtcaccaccacttctttgtctgtaactctgtgatcagaagcaacaattatcaagcagtgcgcagatccccaatatttggaagacaggtcctttttgtccaccctggccccccaaaactgcatgcagactgctgttagaacttatgcatagctacctgtcatggagctgaggagggggaatgagtcagggctgctgactcaactaagagttgaaattgaccgaaattaacccaattttattagccaattatttccctggaagctgcaagcttttaatagtatccgcagtttcaaaatagctacatgagttggattctgccaatgcaaatccaggtgggggatacagattcttcatgctttttattctgccatcttccttgaatcctctgacctgactttttatactaatacattacttcaggtcccatcccacatgtcacctcctcagcaagtctttctgtcacctcagttactcctttccatatatacattttttttaatacacttttcagagtcagggaaatccgattaggttcacagactttactgctttcttaacaacctatgaaaagtcaaatcatataaatgaaccaaactgaatagtgtcactgttacttttatgaagtgttatcccgtagatttaaaaaaaaagaaagaaagccgggcgcggtggctcacgcctgtaatcccagcactttgggaggacgaggagggtggatcacctgaggtcagaagttcaagaccagcctggtcaacatggtgaaatcccgtctctactaaatatacaaaaattagccgggcgtggtggcaggcgcctgtaatcccagctactcgggaggctgaggcaggagaatcgcttgaacccgggaggcagcggttgcagtgagccgagatcgcaccattgcgctccagcctgggcaacaagagcgaaacttcgtctcaaaagaaaaaaaaaactgctttgcaccgatttgcagaaaaagagacaacgaactccctctcgtggtgaggatggcattaacatccacacataactcctttagggtgtggatttctgaattgtgctgagatctccagaatttacagcaagtgatggtcagtttaaaatattctgtgccttcaatgaagaagtagtgtagcaggttagggagaagagaagcaaataaaatggatgaggtcctcacttagtatatcacaatctctcctggaagactatttatttatttatttttttgagacggagtctcgctttgtcacccaggctggagtgcagtggcgtgatctcgggtcactgcaagctccgcctcccgggttcacaccattctcctgcctcagcctcccgagtagctgggactacaggcgcccgccaccacgcccagctaattttttgtatttttagtagagacggggtttcaccgtgttagccaggatggtctcgatctcctgacctcgtgatccacccgcctcggcctcccaaagtgcttggattacaggcatgagccaccgcgcccggctctggaagacaatttcaaatgaataaatcaaggaacatgagagagccacaagggagttcaacctgagtccagttagactccttgaaagggaaagctatttacagaatacttcggatttagctgcggaaatgatttgatgggtcagtggtggtggagtgaggttgagaccatttaaaataggtgacgtaaacatgtgaaacctcagacacagagcccttggtgttaaccatgatctgttgaaagtcagaagaatgaagcagagggaattgttggaagctcacatttgattagcttttttacatataacatgtgttgacaaggccgggagcggtggctcacgcctgtaatcccagcactttgggaggacgaggagggtggatcacctgaggtcaggagatcgagaccatcctggctaacacggcgagacctcgtctctactaaaaatacaaaaaattagctgggcgtgttggcgggcgcctgtagtcccagctactcgggaggctgaggcaggagaatggtatgaacccaggaggtggagcctgcagtgagccgagatggcgccactgcactccagcctggacaacagtgcgagactccatctcgacaacaacaacaacaaaaaacaatgtgttgacgtagaaattatttattgatgtatttttctcaaactaataattattttgaagggttttttttccaccatgtaaacataaccaactcccaggagcttccatgtgtatatgcttaaatgtataatatgtgtaaaagttctatcagacttaaatcatccatttatcacactttaaacacctatgaatgaccagcctgggcaacataccaagacctaatttctaccaaaaaaattttctttctaatgatccaggcatagtgacatgtacctgtagtcctagctactccagaggatgaggtgggaggattgcttgagcctaggaggttgaggctgcaatgatccgtgatggcatcactgcactccagcctgggtgacacagtgagaccctgtctcaaatagaagaaaatgtcaaataagatgaatgtgattgcttaaactcttccacacagaagaatttatcaagatggtcttcagaggtatatcatgaggaagcagtacagtgcaatgaggaaaaaacaacaaaaaacaagtgaagggggcagaagacctcaattctactctttactctctctagatgtgaaacaaccttgggcaagtcactgcgcctctttgagcctgttatttcatctgtaagaagctgagataattaatatatcatagataatgtagtgttctcagtagaaactgaaacagcactctgagatcaaactcattaatattcctacaacaaaatgagtaaatacttgaaacagaacaaaacagccaataaatagcctcttatttcttgatgtcaggttcatgcctaccttacaaaatagagttgtcagagctttttggttcgtagaactgaagaaaagggactgtagactcatggaagtgtctaatgtcagaaagccagatatgtcaaagatgaatttctgaaattaaaacattttatttgggaagaaatacttgtaattcagggcatacacacagaccaagtggtctttggtatgtcttaaaaacagagaacattggaggtttcatgaaaaggagaagtgttacatatggttcttcaagaaagttcattggcactagtaaggtttttgggagttggaaagttctgatcgggaaatgatggcaatgagtaaaactattcttagagccacagcaagttgtttcagtaactattagataaaaccggtttcaggatacaactggctgtttcagcagcttggcagagaatgacatgcttggagcattggtacgtgccctgagtgcttttcccccttggcctgttgactcttatagttgagtttggcaagaatgacccaatttatgtgatcaacattcagtttgctaattcacaacaaaacaattttctgccactccatgactaatgtttttaaatagccctcagcctttggcttgaacttaccaaaggacttttcaaactaaaccatgtccactcttttttttttttttttttttttgagacagtctcgctctgtcgcccaggctggagtgcagttgtgcaatcatgattcactgaagccttgacctcctaggctcaggtgatcctcctgcctcagcctcctgagtagctgagaccacaggtgcatgccaccatgcccaactaatttctatagagacaaagttttgcagtgttgcccaggctggtctcagactgctgggctcaagcaatccacctacctcagcctctcaaagtgctaggattacaggcatgagccaaacatttaaagaactaataccaatcctactcaaattattctgaaaaatagaggaggaggccaggtgcgctggctcacacctgtaatcccagccctttgggaggccgaggcaggcagatcacgaggacacgagttcgagaccagcctgaccaacatggtgaaaccccgtctctactaaaaatacaaaaattagccaggtgcggtggcacgtgcctgtaatcccagctactcaggaggctgaggcaggagaatcgcttgaacctgagaggcagtggttgcagtgagctgagatcacaccactgcactccagcctgggagaaagagcaatactccacctcaagaaaaaaaaaatagaggaggaaggaatactttcaaactcattctgagtccagtattacccagataccaaaaccaggcaaagacacattaagaaaactataggtcaatatccctgatgaatattcatgcaaacatcctcaacaaaatactagcaaccgaattcaacaacacatcaaaaagataatttatcatgaccaagtgggatttatcccagggatgcaaggatagtatgtgatacatcatattgacagaatgaaggacaaaaactatatgatcattttaataatgctgaaaatgcatttgatgaaatttgacatccctttatgataaaaaaaaccttcaaaaaaaccgagtataaaaagaatatacctcaacataataaaaagtcatatatgacagacccacaactagtatactgaatggagaaaaacagcctttcctctaaaatctggaacaggacaaagatgcccactgtcaccactgttattcaacttggtacttgaagtcctagttagagcaatcagataagagaaagaaataaagggcatccaaactggaaaggaagaagtcaaattatccttctttgcagatcacatgatcttatatttggggaaaacctaaagacttcacaaaaaaactactagaaccaataaattcagtaaagttgcaggatacgaaatcaacatataaaaatcagtagcatttctttcagaacaaggatcactgggagaaaaaaaataaaaattaaaaagccaaaaatgaatagcatttctatatgctaacagtaaacaatctgaaaaagaaatcaagaaagtcctctttacaatagctacaaataaaatacctaggaattaatttaacctaagaaataagtgaaagatctctacaatgaaaaccataaaccattgatgcaagaaattgaaaaggacaaaaaatggaaagatattccatgttcatggattggaagaataaatattgttaaaatgtgcctactacccaaagcaacctacagattaaatacaattcctatcaaaataccaaggacattcttcacagaaatagaaaaaataatcctgaaatttatatggaaccacaaaagacctggaatagccaaagctatcctgatcaaaaagaacaaaactggagaatcacattacttgacctcagattatactacagagctatagtaaccagaacagcatggtcctggcataaaaacagatacatagaccactggaacagaatagagaacctagaaataaatctatacatttacagtgaactcatttttgacaaaagtgccaagaatgtacattggggaaaggacagtctctttagtaaatggtgctgggaaaactgaatgttcatatgcaggaaaaagaacctagacccctatctctcatcatatacaaaaatcaaatcaaaatgattaaaggtttaaacccaagacctcaagcatgaaactactgaaataaaacattgaggaacgtctccaggacattggagtaggcaaagatttcttaggtaataccccacaagcataggcaatgaaagcaaaaatgaacaaatgggatcacatcaagttaaaaaagaaacaacatagtaaaggaaactgtcaacaaagagacaacccatagaataggagaaaacacttgcaaactatctatctgacaatagattaatatccaggatatataaggagttcaaataactctatagaaaaaaatgtaataatctgattttaaaatgggcaaaagatctgcatagacatttcttaaaataagacatacaaatggcaaacagacatataaaaaagtgctcaacgtcactgatcatcagagaaatgcaaatcaaaactacaatgagatatcatcttacctcaattaaaatagcttttacccaaaagacaggcaataacaaatgctgtgaggatgtagagaaaaaggaacccttgtacactgttagtgggaatgtaaattagtacaaccactatggacaacagtttggaagattctcataaaactgaaaatagagctaccatacaattcagcaatcccacagctgggtgggattggaaatcaatatatcaaagagaaggaaaggaaatcagtatatcaaagagatattttcactcccatatttatttattacaatagcaaacatatggaatcaacctaagtgtccatcgatgatgattggataaagaaaatgtgttatatatacacaatagaatactattcagctataaaaataatgaaattatgtcatttgcaacaacatggatgtaactgaaggtcattatgttaagtgaaataagccaagtgcagaaagacaaacttcacatgttctcacttatttgtgggagctaaaaattgcaacaattgaactcatagagatagagagtagaaggatgattatcaaaggctgagaagggtagagggggtggggaatgggaatggttaatggatataaaaaaaagagaaagaatgaataagacctagtatttgttagcacaacaggctgactatagtaaaaaataatttagttgtacattttaaaataactaaaagagtataattggattgtttgtaacacaaagggtaaatacttgaggtgatgaccccatttaccctgatgtgattattatgcactgcatgcctctttcaaaatatctcatgtaacccataaatatatacacttactatgtacccacaaaattaaaaataaaaaaggaagtaaaaaaatgtaaattttattcatataagtttatgtaaggccaaggcacagtggctcacccctgtaatcctagcagtttgggagactgaggtgggtggattgcctgagctcaggagttcagcctgggcaacacggtgaaaccccgtctctagtaaaataaaaaaaattagccgggtgtggcgcctgtagtcccagctacttgggaggctgaggcaggagaatcacttgaacccaggtagcagagattgcagtgagccgagatcccaccatggcactccagcctgggtgacagagcgagactccatctccaaaaaaaagaaaaaatttatgtagtactagtgtaattttgtaacatggatatatttgcatagtggtgaagacaggactttgagtgtatccatcactggaaaaaagtacattgtattcattaagtaatttctcattgtctcctcccttcccactccccacccttctaagtctccactgtctattatttcacactctatgtttatgtgtgcacattacttagctcccacttatatgtgagaacacgcggtgtttgtctttctatgtctgagttgtttcacttaagattgggcctccacttctattcatattgctgcaaaagatataattttattctttttatggctgaatagtattctattgtgtatatataacacattttctttatccaatcatctattgatggacacttaggttgattccatctgtttgctattgtgaatagtgctgtgataaacatacaagtataggtagctttttgaaataatgatttcttgttttttgggtagatacccaatagtgggattgctggatcaaagggtagttctatttttagttctttgagaaatctctatactgttttccataaagattgtactaatttacatccccatcaacagcatataaacattcccttttctctgcatcctcaccaacatctgttattttttcctctttttaataatagccattctgactggcgtaagatggtatctcattttggctttaatttgcattcctctgatgttagggatgctgaacattttttcatatgcttgttaactattttgtatgtcttcttttgaaaaatatcagctgggcatggtggctcacgcctgtaattcccacactttgggaggccaaggcaggagaattgcttgaggccaggagtttgagactagcctgggcaacatagtgagactctgtctctctctctctttttttttttattttttgagatacagtctcactctgttgcccaggctggagtgcagtggcacaatcccagctcactgcaaccttcggcgcctgggttcaagcgattctcctgcctcagcctcctgagtagctgcgattacaggcacgtgccaccatgcctggctaatttttgtatttttagtagagatggggtttcaccatattggttaggcttgtctcgaactcctgacctcatgatctgctcacctcagcctcccaaagtgctgggattacaggcgtgagccaccacacccggcccaaccctgtctcttaaaaaaaaaaattaactgggtgtcatggcatgtgcctgtaatcccagctactcagaagactgaggcaggtggatctcttgagcccaggaatttgagtgagctaatattgtaccagtgaattctagcttgggtgacagagggagacactgtctctgaaaaaagaaaggaaaggaaagagaaagaagaaagagagaaagaaagaaagaagagtgagagagaaagaaaagaaagaaagaagagagaggaaggaaggaaggaaaagaaaaagaaagagagaaagaaaagaaagaaaggaagggaaaggaaaaggaaaggaaaggaaggaagaaggaaggaagaaagggggagggagggagaaaagaaaggaaggaaggaaaaatgtctatttatgtccttagaccactttttactttttttttttattttttttgagacagagtctctcacccaggctggagtgcagtggcatgatctcagctcactgcaacctctacctcccaggttcaagtgattctcctgcctcagcctcttgagtagctgggattacaggcacctgccaccacacccggctgatttttgtattttaggtagagatggggtttcaccatgttggccagactggtctcaaactcctgacctcaggtgatccgcctacctcggcgtctcaaagtgctgggattacagatgtgagccaccatgtccagcctttaccacttcttaatggggttgtttttgttgttgttgagttgtttgagttccttgtatattctggatattagtgttttgttaatatatagtttgcaattaatttctcccattcttcgggttatttgttcactttattgattatttattttgctgtgcagaagcttttccatttacttaagtcacatttgtctattttgttattgttgcctgtgcttttgaggtcttaatccggcattttttgcctagaccaatgtccagaagagaattccttagatttccttctagtatttttatagttttgggatttacatttaagtacattttgaattgatttttgtatatggagagagatcagggtccagcttcattcttctccgtatggcaatccagtgttcccagcactgtttattgaaaagggtgtccttaccccaatgtatgttcttgttgactttgtaaaaaaccagttggatgtaaatatgtggattttgttctaggttctctattctgtttcatttatttctgtgtatatttttataccagtaacatgctgatttgattgcaatagccttgtagtataacttgaagttaggtaatgtgttgctgtcagaggcattcgaaccagagcgactccattctgagggctaggaaagtgaggctgggaattgctgggcttcattcccagaaagttaggcatacctcgcttctaggtgtttacagttaaaggaacaaattaataatgtttaccaagacccagacttggtagtgtccagatatcccaatatctggagaacaaaggcatttctaattttgctttaaagataataatatcaattcttgcaaaatatagtaattaagaaaattaatcctttatcatggacccttatagcagagcacatctgcccatatatacaagcatcattgtacctagggtggatgcgttcctcctcttacttacagaaacatccaactctttctggggagtagctgttctttcaccactttactttcttaataaacttgcttttactttgcactgcagacttgccttgaactctttcttgcaggaaattcgaaaaccctctcttggggtctggattgggacccctgtcctgtaacattgcctccaactttgttctttttgtttaggattgctttggttattcgggcacttttttggttctatatgaattttaggattgtttttcctaattatgtgaaaactaacattggtattttgataagaattgcattgactctgtagattgctttgggaagtatagtcattttaatgatattaattctttctgaataattaatgaaattaattcttctgatattagttctttccataagcatgaaatgttttttccatttgtttgtgtcatctgtaattctttaatcagtgttttatagattttttctttttgtagaggcctttcacctccttggtgcaatatattcccatgtggggtggggtgttatttggtagctctcgtaagtggtattgctttctcgatttggttctcagctagattgttgttgctgtatagaaacactgctgacttttgtacactgactttgtatcctgaaactcctgaattaatttaactaatctaagagatttttggtggagtcttaagcgtttctagatgtaagattatatatcactgaacaggaataatttgacttcctcttttccaatttgcatgtcttttatttctttctcttgcctgattgctctggccaagacttcctatactagggttgaataagagtggtgaaagtaggcatccttaatcttgttctagtttttatcattcaactatttccccattcagtatgatgttggctgtgtgtttatcatgtgtggcttttattattttgagatatgttcattctgtacctagttttttgagcttttatcatgaaggatgctgaattttatcaagtgtgttttctaaatctattgagatgatcatatggtttttattcttcattctgtttttgtgatgtgttacatatattaacttgtgtgtgttggaccatttttgcattcctggtataaaacctactttatcatgctgtattatctttttaatgtgcggttggattcagtttgctagtgttttgttggggattttcacatccgtgttcatcggggatattggtctgtagttttgttgttgtgtccttgtctgtttttggtattaggatgttactggcctcatagaatgagttagggagatttcccttgtctgtgatttttagggacagtttcaggattattagtatagttctttttgtatgtttggtataatttttttaatgttgatttttaaatttttatttttttacttagagatgggatcttgttatgttggccagggtggtctcaaactcctggcctcaagcaatcctcctgtctcaggctccacagtgctatgattacaggcatgagccaccacatctggcctatttggtacaattttggtataaatctgtctggcccagagctttcatttttgggaatttttttattgctgattcaatattgctacttattattggtctattcaggatatctgtttcttcttggttcaatcctgggaggttatacgtttcaaaaaaacctataggttttctaggttgtgagcatatagttgttcatagtagtctctgatggtatttctgtggtattggtgtaatgtcttctttttcaattctggttttgttcatttgaatcttcttttttttcttggttagtctagccagcagtttattacttttgttgatattttcaaagaaccaactttttgtttcgtttatcatttgtgttgttttttagtcttgattttgtttaattctgctctgatctttgttatttcttttctgccaactttggatttgttttgttcttgttttcctagttccatggggtaccatgttaggttgttaatttgttacttttttgacagaggcatataattctataaacttccctcttagcatgacttttcctatatcccagaggttttgatatgttgtgttgccatttttgttcatttcaaacaaaatttttattttctgtttttatttcttctttgactcagagatcattcaggagcacattgtttaatttccatgtatttatacagttttcaaagttcctcttggtattgatttttagttttattcagcagtctgagaagatgcttgaaatgattttgactttaaaatttgtcgagactagttttgtggcctaacatatggtctaccttggagaatgtttcacgtactgatgagaagaatgtatattctgcagttgttgggttctgtaaacgtctgttagctccatttggtccaaagtccaacttaagtccaatttttttgttgattgtctgtcttgatgatatatctactactgtgtgtgaggtgctgaagtcccatactattattgtattgctatctatatctttctttaggtctagaaatatttgctttattaatttggcctctccaatgttggatgcatatatatttagtattactatattatcttgctgaattgattctgttatcagtatctcatgatcttctttgtctttttgtactgttttttatttaaagtctattttatctgatacaactatcacaactcttgctgaagcacagtggcgagatcataggtcactgaagcttcaaactcctgggctcaagatcttcccacctcagcctcccgagtagctgggactacaggttcaggacaccacgcactgctaatttttaaatttttagtacagacgaggtgtggctccgttttccaggatgatgaactcctgggttcaagcagtcctcccgcttcagcctccaaaagggttgggattataggcgtgagcccccgcaccctgcctgcaagtcttttaattcacttcaattatcttagaattttccttccccactttatacatacgtacagtggaactgagggtgtttgtctcaggtaaccgatcaatgaagtgaataacctgtagggggcagcagagcctaaggccagtgacaccctgctgaggccagtctggagccggcaaagggagggaaagggagctcccctgggtgtttcccgggcagcctgccctctactgcaggtggcctccagctgctcagaacagctgcggaaggaatgtggatcctgagaagctacagagccctggaaagcaggagactcacgtgcaggtgcactttgtgtaggggggttggggggaggttctgtccttactggggctgtacctagagcctagggacgttttgcgggggcagtgtttggtttttacgtgcaaagggtcccggcgacagactgtaatttgtacatacaaagataatctgtgaagatcaggctcagtaagatttgtctgacatgtcacctggagaaagggtttgtgaaggtaatagtttacttaggttagaagcttaaactgaccccaggtgagaacttctgctggtgaaaatgaagtctagggggaggaagcggttccatattcaggggtgggacggggggagtgtgaggaagtctcatccccaattcccgccctgtagaggacacctgcctctccctcctggtgcagtcttgcctggcctggcctggcctggatttccttcctgctatgaggcaaaggaatgactccattgaacaccgagtctggaattcccagcacacatttctgaaagatcgaggaagctaacagtgccccttctaacaataagtagcaagtttggctgaaatgcagatagccaacgaccagggcgcagggagtgagcttagccttagaaaggctgtagctaggattaatcagccgggctctgcagggctccgttacccagggcttaccctgtcactcagggctgaggggcggagcctggaaccccatccaatcaggggccctgggacggggccctgccaactgtcaatccggggaagcagaaggccgcactcagagtctctgcactcctttgttgctggggtccgttgcgttctgcatccagtccttgctgctccgagaggccccaggtgcctccgccacggctcctgtgacgctgtcacctgcgctgtgacctgctccggagtcataaagaggacgccgggacaccaagaagcagggaaatggtaaagtgcccggcctagcgtccagatacgtggaagaggggctgggtggaaccaacaggatcctgctgtggcgggacccaggcctccgctcgggcgaccccggcgattgggacccgcgtcccccatggcgtggcttggccctcggtccgctcggccgccaggtggggctgggcccgcagctgggaccccgggcgtcctgtcccgtccctacgcggcgactgcggccccggccccggagtcctctctgggcagctccgcgcccgcagcccggcgtcttcccagattgtgcgggggccacgggagggtcatggggggtcggatgtgtcccgcctttcttctgctaaaaattaaactgaggctctgttaacagttaaagagtttgttggagcaacagcgattccgagtgagaaacacccggtcatggcttgtgattgaagaaaaggcttttataagttgcatgaggaggcaaacaggattaaatacttgattagttacagtgatgctgtcgccgtatgtggacttgtcaacctgaaataaaagaatcagattccagttttttaaagtttactcaagcaagaagctgggaatggcccatttgggaaaacacaggatccacggaaatgggctcagtgtttcaaatttaaaagtttaagttcttgcttatataggcaagaaatttaacaggattacaacgttttttatacaaggctagtttgtgaggcacaacaatttaatcagagtttggcccgcccccctccccccgcccccatagagcttttttttttttttctttacatttgggtttcatttcctttccaatttaaaagagtatatttaacattccagcgtaaggcaaggtgatgccagcgtggacaacatggcgagaccccgtctgtacaaaatattttaaaaaattagtcgggtatggccgggcgcggtggctcacgtctacaatcccagcactttgggaggccgaggcgggcggatgacgaggtcaggaattcgagaccatcctggccaacatggtgaaaccccgactctaccaaaaatacaaaaattagctgggcgtggtggcacgtgcctgtaatccggctactcgggaggctgaggcaagacaatcgcttgaacgcaggaggcggaggttgcgtgagccgagatggtgccactgcactccagcctggcgacagagcgagactctgttaaaaaaaaaaaaaattagtcaggtatgatggccgcttctgtagttagtctggaggctgaggcaggagaattgcttgagcccaggaggtgaaggctgcatcaacgacagtattgaatttacagctaataggcaaggtgagggagaggatggaagttggtttagtgtcaagaattagggaagagattgtcaaacgtagggaaaagggacttgattggatatcaggtttgggggaattttctctaaactcccttagaagggtttttgctaccacagggctctgcaggaaaaggccaaagtctactcaagaagaggggggctctgaggagcctgactagtttgatcaaagagggagtttttgggacccctctcccagcctagttcttcccaggtatgacagtaaatccctaaatttctggttttctcctcacattcaaaaacaccaacttcccctcgccaattgacatccttatcaattatgtgtttcccatgctacatttgaaacagctgccatattttatcatttttccacagacaaatgaatagcactatttaaaaatgttatcaacacctctgaaaataaggaaaactttttttttttttttttttttgagacagtctcactgtgtctgttgcccaggctggagtgcaatggtgctatcttggctcactgcaacctcggcctcctgggttcaagcgattcccctgcctcagcctcccaagtagctgggattacaggcatgtgccgacatgcccggcagatttttgtatttttagtagagacacgggaaagaaaacattttttaaaaattttagtccaggcacagtgactcactcctgtaatcccagcactttcagaggcccaggtgggaggattgcttgagcctaggagttcaagaccagagtgggcagggcaacatagcaagatctcatctctactgaaaacaaccaaacaaaatagctgggcatggtgtcatattcctgtagtctcagctactatactcgggagactaaggcgggaggatcgcttgagccccgaagatccaaggctgcagtgagccttgagggcaccactgcactccagcctgggagacagggtgaaaattttcctcaaaaaaacaaaaactttagggcttggcatgctggcttacacctgtaatcccagcactttggcaggccgaggtgggaggatcacttgagtccagaagtttaagaccagctcagcaacatagagagaccccgtctctattaaataaataaataaaattttaaaaagaaaaaaattatattttgtttatgaatattttttatgagaggaaactattcagtaactacccaaaatgacattgggtaaaactccatggctgattcttgacattgatcatcttttcatgtgtttgttggccatttgtgtatgtctgggagaaatgtcattaaaatccattgcttggctggatgtggtggctcatgcctataatctcagcactttgggaggctgaggcgggtggatcatgaggtcaggagttcaagaccagcctggccaacatagtgaaaccctgtctttactaaaaatacaaaaattagctgggcatggtggtgcatgcctatagtcccagctactcaggaggctgaggcaggagaattgcttgaacctgggaggcggaggttgcagtgaaccaagatcgcgccattgcccatattttagtcaattagttttcctttttggtacaataatttttctagttaattacaataagaaaaaccttaaaaattttactagctcaagcattttaagtgtaccattgagttagtttgacaattttatataacttctctaagatgagtcatactgcatttttctttttctgactggtcttttgcagttagcttagtatcatgaagtttcatgcctgttgtagtatgggacaggatgtcattttataagaataaataatatcctgttgtatatatatatacattttcattatccattcatccattgattggcatttaggttgatctacctgttgggtgttgtgaacaatggatttcaattcattttattttattttttatagagattggatctcactctgttgcctaggctggtctcaaattcctgggctcaattgatcttcctgcctcagcctcctgaaagtgttggggttacaggcatcagccactgtacccagccatcgatggttttcaaatatttctttgagatcctacttttaattcttttgaattgaatataattcgacctaaaagtgggttgctggaacatttggtaattttgtttttaatttttgaggcactgccatactgtttttcatagctaagccattttacaatcccttggacagtgtacataggttccagtttgtcagcatgctcatcaaagctttccatttggcatgtttgatgtgttttttatagttgaattatggaaattctttatatttgctgaaaattaagaccataccagatatatgacttaccaacattttctccaaattgatgagttttcttttcccttgttgatagtgtgttcccttgcacaaaagttcttaattttcataaatcacattacctttttgttaagactgccccctcacagagtttttacctctaaaccttgtccccattcagccttcagcacttcatcaattacaatttatgttgtcttaccccagtattatttcccataatggttttggtcatgggtttctgtttcagttagttatgactctcttaatcagttgggttggtgagatcccatgcaaaattcggtttttgtttgtttttggatttgcctgtgctgtttgaatgagaatcaaatccactttccagataccatcaaaggttaaactttgtgaacacacattttcaagtatatgtagtctcaggactgctgttgtgagctttttctctgcacatgaattagtaggactctgttacaaaagatgctacacacccaatgtacagagagacattggggtacctaggaaacacatctttctctccggattcaccaaaaagagacattttcctattctttttttttttttttttccaagatggactctcactctgttgtccaggctggagtgcagtggctctctcttggctcactgcaacctctgcctcctgggttcaagtgattctcatgcctcagcctccctgagtagctgggattacaggcgcctgccaccacacccggctaatttttgtatttttagtagagatggggttttgccacattggccagcctggttttgaactcctaatctcaggtgatctgcctgtcttggcctcccaaagtgctgggattacaggcgtgagctaccatacctggccataaatttgttattttggaataattttagatttatagaaaacttgcaaagataatctacaaagttcccatatacccgtcacccattttcttctaatgtgagcatcttacataaccatggtccaacaaaactaagaagttatcatttgtatattactattaatgaaattccagattttcaacagtttttccactaatatcctttttctattccaggacccaatccagtataccccactgtatttagttctcatgtctccttgatctgctttgtgacaatttctcagtcttcccttgttttttaaaatcactttgacagttttaagagtgctggtcaggtattccatagaatgttcctcaatttggaatttttctcatgattagactggagttaggtgttttgcaggagaatgccacaaaggtgaagtgtccaggctcatcacttgatacacctggtgacagtaaccttgatcacttgattgaagcagtgtttgtcaggtttctccactttaaagttactatttttacccctttccatactctgttctttggaagtgagtcactaagtccagcacaggtccaagggaggagggccaattcagctccatagttctggaggctgggaagtctaagatcaaggcacgccaggcacggtggcttacgcctgtaatcccaacactttgggaggccaaggtgggcagatgacgagatcaggagtttgagaccagcctgaccaacatggtgaaaccccgtctctactaaaaatacaaaaattagctgggcatggtggtgcgtgcctgtaatcccagctactcaggaggctgaggcaggagaactgcttgaacccgggaggcagaggttgcagtgagccaagatcgcgccactgcactccagcctgggtgacagagtgaggccccatctcagacaaaaaaaaaaaaaaaaaaaaaaaagatcaaggcactggcaggtaccatgtccagagggtccattcctcatgaactccatcctcttgctgtgtcctcacgtggcagaaggctacattttcctattctgctgttgctttacccatagttacactctggcatcaaagttgctgtttgagaggaagtgagtgtagacaggggagtaagaggtctgatgacagaggcagggaataaatgtttggagtccacagcatcatgagaacttcttgggaatagagtctaggcccccagtgctgtcactctcacccatcctcctctacacatgtgagatgtttcaggacccagtggcctttgaggatgtggctgtgaacttcacccaggaggagtgggccttgttgaatcctttccagaagatctctacagagatgtgatgcaggaaaccttcacgaacctcatctgtataggtaggggtgacaatattacctccctcagtgaattgtagaacatatgtttctagttcatcagtgctattcagggatttggaatatggataggcaatccttcgatgaacaaatcaggcatggctgcagtgtcccataaacatggaatctaatgatttttaaataatcttatactaattcaggactattttttagggaaaaaatggaaagaccagaacattgaagatcaatacaaacatcccaggagaaatctaagataatttacactcacaagacaaagaaatgtctctaaagaaaatctcagattgtcagaaattgttaaaaagaagccaacaaaagaaataagctcagcataaaatgtatttattcttagaaagttttctcgaaaaacatatatttcaatgtgatatagaggtttaatgttcataaaatagcttacttggaaatagtattaagaaacctcagctggccgtggtggctcacgcctgtaatcccaggactttgggaggccaaggtgggcggatcacctgaggtcgggagttcaagaccagtctgaccaacatggacaaaccctgtcgctagtaaaagtataaaattatccaggcgtggtggcacatgcctgtaatcccagctactcgggaggttgaggcagaagagtcgcttgaatccgggaggtggaggttgcagtgagctgagatcacgccatggcactccagcctgggcaacaagagcaaaactccgtctcaaaaaaaaaaaaaaaaaaaaaagaaacctcatgtaaatattctttttttgatgatagatatagacaggccatcttgtagaatgtgtgatccattcatgtttaaacaattcagacagggcagaaagtctacacttcatgggataatgttaaaaatgcagctggacatggtggctcatgcctgtaatcccagcactttgggagaccaaggcaagaggaccacttgaggtcaagagcccaagatcagcctgggagacacagcaagactctatctctaccaaaaataaaaaattagctgggtatggtggcacacacctgtagtccaactttctggggagtctgaggtgggaggatcacttgagcccaggcggtgaaggctgcagtgtgttatgatcacaccactgcactccagcctgggtaacagagtgagactttgtaccaaaaaaacaaaaacattaaaaatgcaagtgtaatacttattaacaaatattaaatcgcttataaacagacccttaattatgtgcttggcatttttcacagaaattttatgggagagagactctttgagagtgcagaaggtagtcagtgtggagaaactttcacccaggttccggaagacatgctgaacaagaaaactcttcctggagtaaaatcatgtgaaagtggtacatgtggagaaatcttcatgggatattcatcctttaataggaacatcagaactgacactggacaccaaccacataagtgtcagaaatttttagagaagccatataaacataaacaacgtaggaaagccttgagccatagccactgctttcgaacacatgaaaggcctcacactagagagaaaccttttgattgtaaggaatgtgaaaaatctttcatttctcctgcaagcattcgaagatatatggtaacgcacagtggagatggaccttataaatgtaagttttgtgggaaagccttggattgtctcagtttataccttacccatgaacgaactcacactggagagaaacgatatgaatgtaaacaatgtggtaaagccttcagttggcacagttctgttcgaatccatgaaagaactcacactggggagaagccatatgaatgtaaggagtgtgggaaatcattcaatttttccagttcctttcgcagacatgaaaggacacacacaggagagaagccgtacaaatgtaaggaatgtgggaaagccttcaattgtcccagttcttttcacaggcatgaaaggactcacacaggagaaaaaccctatgaatgtaaactatatgggaaagcattatctcgccttataagctttcgaagacacatgagaatgcacactggagagaggcctcataaatgtaagatatgtgggaaagccttttactctcccagttcatttcaaaggcatgaaagaagtcacactggagagaaaccctacaaatgcaagcaatgtgggaaagccttcacttgttccacttcgtttcaatatcatgaaaggactcacactggagagaaacccgatgggtgtaagcaatgtgggaaagccttcagatctgccaagtacattcgaatacatggaaggactcacactggtgagaaaccctatgaatgtaagcaatgtgggaaagcatttcattgtgtcagctcctttcatagacatgaaaggactcacgctggagaaaaaccttatgaatgtaagcattgtgggaaagccttcacttgttccatatatattagaatacatgaaagaattcacactggagagaaaccttaccaatgtaaggaatgtgggaaagccttcattcgttccagttactgtcgaaaacatgaaagaactcacactattaatatatgagagaaatgctattttttaatttttattttaatagagacagggtctcactatcttgtccaggttggtcttgaactcctggcctcaagcatccctcccagcttgaagtgtcaataaaggaaggcaataaaatgtagagatggagttaggtgatgccacgctgggattcactggtggcctatcttacatatgatttcgaaggcagacatgaggaaggccttagtcacattttagagccagccaaattcacatgggctgtgtggccccctgattctagcccattttcctgattctctggcttgtcaatcaagagtatcctccaaatctcttgactttccttttttcagaggtgtaggtttccaaagatgtccccagaagctccacattcaagttctatctacagtttggtttttctttaagtattgtaatgtacataccagagagataatgcagactgtcatgggtggggaatgttctctgatgctcaactcccctagtctgcagattgagttggtaggaggtgtgatttgtttacatgcacctttgttcctgctggtagtgaccttgttcttgattcagcctgacagctactatgctgccatcagaaccaacttgatgagagctctgctgccctgtgcagtgactggtctcatccaggactctcatgtgagaaggaacaccttgctctggtcaggaaatgtccagtgtttcctgttatccacaggagaatgtaatgcctcagttcattttcagttatctttgattatatgtgattgacaatgtgtatttttgagggagcaaagatttctgtacatatttcttaaaaatagtttattcagctgggtgcagtggctcatgcctgtaaccccagcactttgggaggccgaggtgggcggatcacgaggtcaggagtttgagactagcctggccaacacagtgaaaccccatctctactaaaagtaccaaagttagccgggtgtggtggtggatacctgtaatcccagctactcgggaggctgaggcaggagaatctcctgaacctgggaggtggaggttgcagtgagccaagatcacgccactgtactccagcctggacaagagagcaatactctgtctcaaaaaaaaaaaaaaaggtttattcactgtttttcagttgtgtacttgcaaatgtttttctcttttttttgtatactgagaagctctattaaaatatcccttgtcaacatggatcagatcaaatgtatactgttaccaaattatttgtttgatattgtgaatcaatatcaccatgtgtataaacctcatttatttcctgatgtaaattatacatttcatgcatatctacttataatttttacctttttttttttgagacagggtcttgccttttaacccaggctggagtgcagtggtgcaatcatagctcattgcagctctgagctcctgggcttaagtaatcctcctgcctcagcctcctgagtcgctgggactacaggtgtgcaccatcatgcctggctaatttttttttaatttttagtactgaggaggtcttgttatgctccccaggctagtctccaactcctgggccaaagcaatcctcctgtctcagtcttccaaagtgctgagattataggcgtgagccactgttcccagccacaatttttatcttgaccataatttgtcattcttttataatccccgaagttaaatcttgctgttatggtgctgtgttgcccaaaaccaccagtactaaaaaaactgttgtcaaagaggatgtaataaattgtagtaataaatatgaccacaagccataaatgactgcaggacataccaataagagggttctctgtagaatttcttacaggatttctgttttaggtgcattgttctctattcaaggaggtgagtcatttttgtatattggatgctgtcaggatgtgaacttaattgtaccactgctaatcatagtagttctcacctagaaggagaaagaatggattggaggtaaacctaattgaagacaattgctggtcagtccattatgagaagaggggaactggaatttttggttatttttatgatttgaaatatgttttcttctatcccatctagggacgtggttacagaatgccctcgtttttgtcctgctccatcatggtcactgaggagcactgcttcacactgcaggtgtctgacatggcttaagatttggccttgtggtgaggggaggcagctcccagacttgtggacctgtttttgctttacttattctccaaaacctaagatatttcttagagtgtatgaacactgttccacaaaatgctccagttaaaaatatataaaatcacttactccttaggaagctgtataatacttttaaagaaattccttactgagtcaagtgtggtcaatatatttatgtaactgtctgaatgcacgcctaggaaggatgaaagtcagtatcactattccaaccaagcctttcttgctcagataatatgctcttgatgcacccctcttttttctttttgacacagggtctcattctatcacccaggctatgtggagtgcagtggcgtgatctcggctcactgcaatctccacctcctgggctcaagcgatcctcccaccttagcctcccaagtagctgggaccatgcccagctaatttttgtatttttttttttagagacaaggtttcaccatgttgcccaggctgatctcgaacaggagttcagcaacccttttatgccacactgtagagtaataggcaacatggaaaagttagttttatatattatgcagtggcatggaccaatccaatcacttttttgaagtgccagccaaactcttcttcagagaagcctgtttgaaaccccctagagtcaaaacctggtaccacaggacagagcagcaatgagtgaccaacccctgactctatgtgcagatgacacatccatccccagattaggtatcaacataagtgaaaggtactgtcattgcctgtcattttttttttttttgagatggagtctcactttgtcacccaggctggagtgcagtggcacgatcttggctcactgcaacctctgcctcctgggttcaagctattgtcctgcctcagcctcccaagtagctgggattacaggtgcccgccaccacacccggctaatttttgtatttttagtagagacggcgtttcaccatgttggccaggctagtcttgaactcctgaccttgtgatccacctgcctcggcctcccaaagtgctgggattacaggcgtgagctactgcacccagcccattgcctatcagtttttatagagtgtcgcttagatcaagaaagagatggtaatacagagttaggtgtgtctgaaaccaaacacgacctcatccttctcccttgaaggccaaatgcactctgagagtttggttagagtacaaacaacgccaccaacttcactccagatgtgattttctacaggaggcgggcactgtgttgggatggccagtgaaggtaaggaacactagaggtgcaggtttaggtgatgaacaggacacagcctggacattattagccttgactatggaggtgtcttgatgtttctcaaattgagaccagtctggccaacaggatactgaactggttttcgatggaaaaattcatctgtatagggatctattcgcttcctttaagtttcagtttcgttatgtggcatttagcatgagtgactccattttggtctgatctggtttctaagtgcctagtgcagaagctcagtccaaaacaatggcctcccataatgttcattttaacattttctttatactaatacattatatcaggtcacctcaaatgtcacctccacagagggttcttcctctcacctcagttagtcctacttctttccattcagttttttgttacactgcactttttaggatctgggaaatctaatcaaagttcacagggtttattgcttattctttttctttttctttttctttttttgagacagagtctctctttgtcgctgcccaggctggagtgcaatggtgtgatctcggctcattgcaacctccaccttccaggttcaagcgattctcctgcttcagcctccttagtagctgggattacaggcatgcaccaccacactcagctaatttttgtatttttagtagagatggggtttcaccatgttggctaggctggtctcgaactcccaacctcaggtgatccactcacctcagcctcccaaagtgctgggattacaggcatgaccactatgcccagccaggttcattactttttaaaaatcaatctatgaaaaattaaattggccaggcatggtgcctcagaacctgtaatcccagcactttaggaagctaaagtgggagggtcacttgaggccaggagttggagagcagtctgggcaacacagtgaaaccccatctgtacaaaaaatacaaaaattcgctgggcttggtggcgcacacctgtggtcccaggctctacttgggaggctgaggtgggagaattgcttgagtccggaagatcaaggctgcagtgagctctgtttgcaccactgtactccagcctgggtgacagagggagaccttgtaaaaaaaaaaaaagaaagaaagaaagaaagaaagaaagaaagagagagagagagagggagagagagaaagaaagaaagaaagaaagaaagaaagaaagaaagaaagaaagaaagaaagaaagaaagaaagaaagaagaaaagaaaagaaaaatcatgtaaatgaaaccaaattcagtgatgttaccttaactttttttcttttttcgggtagagacagggtcccactatgttgcccaggctggtctcaaactcctggcctcaagcgatcctcctaccttggccttccaaaatgctggtattactggtgtgagccaccacacctgtcctacctttatttctaataactgatatgccttacattaaaaagtcttttagaaaacacctttgagccattttccagataggggaagtcaatgaagctccctcttgtggtgagggcgactttaacatccacacatcctgtctgggggactggatttctgagttgtgctgagacttaagagtggaaaaaaagtctactctttttcctctgctctcacacaacacggaatacttctgtgaccaaatgcaaatatttgagaagtgtcccccacatgccaagcaaagcatcaattctgcaactgactccagctcgatgtcttctagttccaacactttctacctttacataaggtacaaaactgcctcagaaatcatctgaccatgtgtcccggtttgccagtgataatccttgatagtacctgttgtcccaacatagtttttcatagcacctcatcttgccatggttatctgtgtctgaacaatgaatatgtatgaatactttcacacataagcaaaattaggtttattaaatgaagtttccaggaatgttcaaatttcaacacctgatttaccttatcacaagttatggctgtgctaatttctccaggaaatattcacagaatattgaatttatcattgtaaggtgtggagcaatgaagatgcccaagaggccaggcgcacacctgtaatcccaacactttgggaggctgaggctggaggatcacttaagctcaggagtttgagatcaacctgaacaaccgaatgagacctcatctctaccaaaaataaaaaactagccaggcatggtggcaggcacttgtagtcccacctacttaggaggctgaggtgggaggattgcttgagtctgggaggttgaggctgcattgagtagccatcgcaccactgcactccagcttgggcgacagagtgagaccccgtctcaaaaaaagatggctaaaacataatttttttttttttgagatggagtctcactgtgtctcaggctggaatgcagtggcacgatcttggctcactgcaaactctgcctcccggttcaagcaattctcctgcctcagcctttcaagtagctgggattacaggcatgcgccaccattcctggctaatttttgtatttttagtagagataggatttcaccatgttggccaggctggtcttgaactcctgacctcgtgatccacctgcctcagcctctcaaagtgctgggattacaggcatgagccaccgcgcccggcctgcctaaatcataatttctatgacagaatttctcatttacagcttcccctgagaccatctttcatttcagttaaccctgctccttgggggttatatgtgagataaaagtgccatgctatatcatgttccctggctcagtcctacacagcatgtcctgaaaaatgggtcttcagtcactgtcaatgcaccagggatagatatacatagtactgagagcctctaaatctttaataagttctggcttggttagctcccttacaaggaaaaccttgctggagtccatagcagtgtgaggaagccttggccatgcctcatcccatttcccgcacgctggaagacatctgcctctctctcctggtgcagtcgtgccttgcctggtctgggctcccctcctgctctgaggcaagcgtatctctccattgaacactgagtctgaaatgccctgcacacacttgtgatcccgtgcagaaggaaggagcagggacagccccttgaatgaggaagctaacagtgcctcttctaacaataaggagcaagtcgccttgaaatgcaaatatctgatgaccagggctcaaggaaggcgctcgcttagagaggctgttcgcttagagaggctgctcgcttagagaggctgctcgctcagagacgctgtggccagaacaagtcagacatgatctgcaggacccggttacccagggcttctgctgtcactcagcacggaggaggcggggcctggcgccccatccaatcaggggtgctggggcggggccctgtcaactgtccatccggggaagggggaagggacagtcgccctccgtccattcctttagtgctgcgccgacagcggtcaggatctcggctttcttgcttcgagagggactaggtgcctccaccagagcttctgtcgctctgtaacctgcactgtgacctacactagtcgcgggagccacgcagaggacgccggaacaccctggaagccgagaaatggtgtgtgtgagggggctggcgtccgggcgactgggagaggggctggaatcggccggaaccggctgaggcgggacccgggcctccacgcggcgactccggggtcgtggacgcgagtcccctcggtcgcagggtggggctgggccggcagccgggaccccgggcctcctgtcccgtcccttcacggcgactgcggccccggctccggagcctaatctgggcagctccgcgtctccccacattatgcgggggccacgggagggatatggggggatcccgcctcggatatggggtttgttagaaacaagtgcccggtgccgcaaagaaaaccagcatctaggcagaaaattcctcagcaaagcaaatttatttctacacaagggtgcagcttgcgccagtcacaagagcacagcgagcggggtagggcaggggtttttctccttaacgcagtttctagcacttctgtgtcctttcctcattggctagggttggacctcacaatctaaactaactcgataggctaaggtttaaaattaaatagggtctggccaggcgcggtgggtcacgcctgtaaccccagcactttgggaggccgaggcaggcggatcgcgaggtcaggagatcgagaccatccctggctaacacggtgaaaccccgtctccactaaaaatacaaaaaaattaactgggtatggtggcgggcgcctgtagttccagctactcgggaggctgaggcaggagaatggcgtgaacccgggaggtggagcttgcagtgagccgagatcgcaccactgtactccagcctgggcaacagagcgagacaactgggcaactccgtcacacacacacacacacacacacacacacacacacacacacaaattaaatagggtctatgagacgggaaggaacagggactgtccgttactaggcgggaaggcgtatctggacttgtctgggcgcggcaaaagcgggaaggttgtttacagaacaggtagctaggagacaaggaagtcggtctcaagaaacaaagaacagcttactaaagcttttagaaaagtaatttatcatctctgacaggttcgtgtgggaggagtagcggtctttggggtccccagtgcccacttttttctgttaaaaattaaactgaggtacgttaacaattaaagagtttagggccgggcgcggtggctcacgcctgtaatcccagcactttgggaggccgaggcgggcggatcaggaagtcaggagttcaagaccagcctggccaacatggtgaaaccccatctctactaaaaatacaaaaattagctgggcatggtggcgcgtgcctgtaatcccagctacttgagaggctgaggcagaagaattgcttgaacccaggaggcggcggttgcagtcagccaagacggcgtcactccagcctggcaacagagccagactccatctcaaaacaacaacaacgattcacgaatgagaaacacccagtcctggcttgtggtttgtcaacggaaaaagccaagctatgtaaaataaagaagtttattaggagccgaataggagagccgttggccgagggaaacacaaccccaagcagcctggagtaagtggtcccgaggcagctcaagacagtttggttttattcatttcagagagacaggaattgcagggaaaatcatgaatcagtgcctggaaggtgtaagttccattggcagaaagggtgggacctgtggaaggggggttagaaggcacaggtagttgagggattctgtaggtggcagctggttgagagtgttgaatctttgtctaaagtttggaggaggtaggaaggaatgctgaaggaagggggtctgttatctgccacttcattccatcccagccaaaaaacagacctgtttctcgagattttatgaattctaaggcgtaactttacctttgccttgcgtggccttaggtcttgtttgtaatttggtatcttgttgccacaaggagtctgtttttccagtcagataatgtctgtttttacatgaatgtgcgtcagttgctgcatgtaaactcctaaagggagagggtataaggagacctgtctcacctcccatcctgtcatacagaggcactcaattttcagggttttttgggggttcccttggccaagagccagtcacttcacttagctgggaaggtactttgtttttgtttttgtttgagacagagtctcctgtagcccagggtggtgtgcagtggctctatcttggctcactgcaacctccaccttccgggttcaagcgattctcctgcctcagcttcccgagtggctgggattacaggcatgtgccaccacacccggctaatttttgtatttttagtagagatggggtttcaccatgttggccaggctgttcctgaactcctgacctcaagtgatccactggcctcggcctcccaaaatgctgggattacatgtgtgagccacctcaccaggccagaaggtatgtttttatttttagtttacaggttgaaggctggacttttataaggtacatgaggagacaaaccagataaatgcttgattggttgcagagatgcagtcaccttatttggacttgtcaacccgaaataatcgaaagtttcagatttcaactggaagagtttattcaagcaaaaagatagcaatggcccatttgggaaaaacacagactccagagaaatggactcagtactccaaaattggaagttaagttcttgcttatattactgggaaaagaggtcctgatcagatcccaagagagttcttggatctcatacaggaaggaattcaagacgagtcggaaagtacagtgcaaagagagtttattgaaagctactctgggccagcatgatggcttaggcctgtaatctaagcactttgggaggccgaggtgggaggatcacttgaggtcaggagtttgagaccagcctgggcaatatagtgaaaccccatctcttccaaaaataacaaaaattagccgggtgtggtggcctgcacctgtagtcccaggtactcgggaggctggatgggacaatcacttgaacccgggaggcagaggttgcagcccagctgaggacacgccactgcactccagcttgggtaacagagtgagaccccatctcaaaaaacaaaaacaaaacaaacaaacaagacagagttcaagaccaacgtggccaacacagtgagaccctgtctctatttaaaaaaaaaaaaggaaagaaagaaagaaagcctctcttacagagtagggcatcctcctaaagcaagtggaggaacgtactgtctaagtttttcttatgtagggatcttgtctatgtaaaagactaaactgagctgtgcctacgtgcatgtgggctgacagcgtcacaaaatttattactctgttgatttaaagaaaactatcctttacattttagtgcatacaagtgcattaaaacataactataattatcaggccaggtgtggtggctcacgcctgtaatcccagcactttgggaggccgaggtgggcggatcacttgagattaggggttcgataccagcctgatgaaaccctgtctgtactaaaaatacaaaaaaaaattaactgggcatggtggcatgtgcctgtgatcccagctactcgggaggctgagacaagagaattgcttgaacttgggaggtggaggtgcagtgagccgtgattgtgccattgcactccagcctgggcaacaagagtgaaactctgtctcaaaaaaaaaccaaaacgaaacaaacaaaaaaaactataattatcttgaaagcacatattattatgggtattgggacatcaggacattctgttgttgtgggagtgtaaggatacttgcaggcatcttcaggctgtctccttcatgggaaacattttgtgatcatgggttgcgactggcaaggagtgtttcttgttagtctcaagatggagctgaacttaaattggtgtgttactctggctcccctaggcacctgcttccctaacacttatataggcgaaaggcaaataaatataacaggattacattttccatagaaggctgatgtatgaggtacaacaatttaattattattattattattattatagacaatatcttgctctgtggcccaggctggagcagtggtgcgatcatggcttactgcaaccttgacctccccggctcaagcacctccgcctcccaagtagctgagactatagtcgcccaccagcacacctggctaattttttattttttacagaggtggggtcccaatacattgctcaggctggtctctagctcctggcctcaaacagtcttccttctttggcttccaaaatagctgagattacaggcgtgagccactgcacctggctaacaacctaattcattatggttttttttcccccagagcttgttttctttaaagctcgtttttatttccttttcaatttaagagtgaatttaacattccagctgaagacagtgtgatagccatgaagtctttgtgtgagaaagttaagagggaagttagtctactacagagatcagtagtgaagagaggccctgtgggatggctcacacctgtaaccccagcactttgggaggccaaggcaggtggatggcttgatctcaggagttcaagaccagcctgggcaacatagtgagaccctcccccccatctcaattatgaaaaatcatattaaattttaaaaaaatagtgatgagggaaagggtctttcctgttttccctcagtcatttacaacattttacaaaacagtataggtaagaaagaaggcgaatctgtaatcagggaaaggagggttccaactggctatgtaaaagctgtgtgtcaggtgactcaactccatgatcacattgcttaaagataatttagagattaaattttttaattacttgtgttttgtttgtttgtttttttgattttttttgagacacaatcttactctgtcacccaggctggagcgcggtggcaccatctgggcccaccgcagcctctgcctcctgggttaaagtaattctcctgcctcagcctcccaagtatctgggattacaggtgcgtaccaccacacttggctaatttttatattattagtaaaggtgggggtttcaccatgttggccaggctggcctcgaactcctggcctcaagtgatccgttcgccttggccttccaaagtgttgggattacaggagtgagccaccatgcctggcctgacttacttgttcacacagcctatataggtagaagatttctagtcatgtaatcacaggttaattggtggattatgcctgattaagcataaatttcatttccctataaattagtaattttcaagtgttttatttaaatttgattttagtgtccttaggtaggaccttagaatactacacacagtttggtctcattgcttcttatttaaattttttcacactttccagggtgagtggtttcccactacaatttccaaatatacgggatgcagggcctcaaatcctccaccctcataccacagcctgactcttcaagggcttgcagtgaaatctgtgtctgaacatttcacatgagaggaaagcagagaataaccactagacattttcccgagaaaacctttctgcctctcctccttttatctttcctagacacagtcacctatcaggatgtctttgggatgaggttcctttgtggaaactttacagggtgatgtgtcttccatacaccctcgtatcctttttgtttgtttgtttttgagacagagtctcactctgtcgcccaggctggagtgcagtggcgcgatctcggctcactgcaagctccgcttcccgggttcatgccattctcctgcctcagcctcccgagtagctgggattacaggcacctgccaccacgcccggctaattttttttgtattttttgtagagacggggtttcaccgtattagtcaggatgttctcgatctcttgaccttgtgatccgcccgcctcggcctcccaaagtgctgggattacaggcgtaatccggccactgtgcccggccctacaccctcctgtcttttccaggtttcgggttttagaacggcctggggatgactcaaaatccccacgactgccctgtctcctggagggtctagtggctatcagtgcctaggggagtggagcctcctgagggagcagctgaatgaataatagtggaggagatgcctggtatgctcttcatctacataaccaatacttggggtgctcagcttctctctcccaactccagtttccattcattggagacacatgaccgtcagccaattggatgttgctattgaggaaaaggagaaatgattcctatcttctggattgtctcatctctgaagagagaactcagagaactcccaaaagacaaggaaaggccacttcaacggggtggagcaatagcctgcaaagcaaaatatacatgggggtacacaggggacacaatgccgtgttggtgggaaatagtcaattagcacttctcctttcctctatgtgaaatgttcagagaatcaccaccagacactttcctgtcaaaatatgcatgcttctcctccattcatctgttctggaaacagattttatcagattgtcttttggttgaggctcccctttggaaacttcaaagggtgttatgtcttcagcgcactctcctatgttttcttggtcctgggtggcagaattggggtgacctaatatgcccacagttgccatgtctcttggagggtctagtgagtatcagccggagtcactcctcccaggggacagactgaggtaggagaatggggactcccaagagagcagctgaatgccttgtgatggaaggagactcctagtatactctgcatctagatagccaacccctcgagatgctcagcatttctttccaaaccccagtttcctgaacttggagacctatggctggtcagccagttggatggtgctattgagagaaaagagaaatgcttcctgtcctctggattgtgtcaactgtgaagggagacaaaaccccaaaaaacaaagaccaccccagcagggtggaccagtagcctgcaaatcagaatatgaaagggggcacacaggggggtatagtgcagtgttggtggaaagtagtcattgagcgcttcggtgagcaggatgggggtggagagatgtctcatgtgatagggtgactgtgctgacacatgagtcagacatcactgtgttccagccagcacggcccctctgtgggcttgtcccttgtaaagaattgttcatagattgcagcttgagtgtttcaaattaactttacattgcatttgtcactagaaccaaatccaagaatgattgcgtaggtcagtgagacacagaagaggcaactcaacaaagcccatgacatacagtgcatggctcacaatcccaggagatgagggcagcacagctgcagagcaacacagagtggggggaacatccaggatgcacattcaaccagtaggtggggagcaagacagacagggacctgtgggccaaagcgtttcttggggtctagggaattgaccaaggaggtgtctcttggggagttgtttctggtggatttagagcaagcaggcactagttctgtgaagtcgcactgtgattaagaggtggtctgtaccatccatgtggggtgtaagggtcagtggtacaagtcaaattggttatatctagctgtcccacagggaggtggtcaccagaatgcagttgtgtaataaatatatgtgagttgaccacatggaggaactgggagaaagtggagaactagaaactctgttgagtttgaataaagttttcttccgttatgagaaagttaaatccttaaagaaaatgcatgctaaggtaacatataattataagaactcagtataagaggcaactctagaattaattaaattattgtatatggagatgacaggtagtggattgattattctcctgtagataaccatttgtccctgctttttctgttaagtgttcaccacttgtatcattggctggcaatacctggtttgtcatagtttcacattaccttaaacagatgcccagactgggcacagtggctcatgcctttaatcctagcactttgggaggctgaggcgggtggaacacctgagatcaggagttcaagatcagcctgaccaatatggtgaaaccctgtctctactaaaaatacaaaattagccaagcgtggtggtacatggctgtaatcccagctactcaggaggctgaaacaggagaatcacgagaacctgggaggtggaggttgtagtgagccaagatcacaccattgctctccagcctgggcaacaagagtgaaactccgttaaaaaaaaaaaaaaaagatgccctggtttcacaatttgctttttccattggtctatctttgtctctctgataataccattttctcttaattagtatagcattcaaagctgcagtgtttagtgggtatattgcctgtctatcttagtcatcttgggctgctatatcaaattaccatagactgggtgacttaaagaataaacatttctttctggcagttcttgaggttgtgaagtccatgttcagggagctggcagatctagtgtctggtaagggcccacttcctggttttgcagatggtcatcttcttgtgtttcttcatgtgacagaggagaggaagccggctctcctgtgtcttctcataagagcactaatctcattcagaaaggatcgactcttatgctgtcatctaatcctaattacttttcagagatgtcaacttctaatactatattgggggtaggttattaatatgtgatttttttggagtgatgcaaatattcatgccgtaacacccccccaaccatactctatagagcatcttggctattcttagtcattgtgttatatttcagtttttagaagtagtttttccttaattttagtgaaaaaaacaaactgccttgtaaatttcatggactaaaatataactgtagtcatatttcagaaacgttacatcatagtgctatttaatctccttttaaggacacatgacattttttcatttatttcattttatattgatgtttttcagtgtagactttttgcataataatcattttatatccttcctgagacttttttggacttgaagaaaattagttttaatagaaattagtggctgggcgtggtggctcatgcctgtaatcccaatatttgggaggccgaggtgggtggatcacctgaggtcaggagtttgagaccagcctgacaaacatggagaaaccctgtctctactaaaaatacaaaattagccaggcctggtggcacatgcctgtaatcccagctattcgggaggctgaagcaggagaatcacttgaacctgggagtccaaggttgcggtaagccaagatcacaccactgcactccagcctgggcaacaagagtgaaactccatctcaaaaaaataaaaaaaaaatgaagagattattccagtgtcggcaacatggcaaactttgcctatacaaaaaattacctcgtcattgtgatgtgtgcctgtcgtcccagctactcaggaggctgaggtagaaggatctgttgagcctaagagttcgaggctgcagtgagctatgattgcaacactacactccagcctgggcaacagaatgataccctgtttcaaaaaaaaaaaaaaaaaaagaaaagaaaagaaaaaagaaaaaaattagtttcaataggatatgctgtcttttaaaaattacattcagcaacttgttgctgataattaaaattcgctgagatttatttctgtatagagtgtgcattctagaaacttactaaaaatattatgtatgcacaaaatacataaaagaattgcacaatgaattcaaataatgatggaaccagtattgggaataagataactgccttacttttccttatactttctcaacctgggtatgcatcctcatcagtgtgttttatttttgcatgttttttatgcaaatgataaccgatatgtgatattttatatcggattttattttaactcagttatgaaccttatatggaatgatagttaattcactttcttatttaatggattttattatttagaacagtggttgtttccccaaaacattgggcagataatccacagagttccagcatttttattccaggctcatagttccccccaccaccctttttttttttttttttttgagatagaatcttgctctgttgcccaggctggagtgcagtggcatgatctcggctcactgcaacctccgcctcctgggttctagcaatccttctgcctcagcctcccgagtagctgggaatacaggcgcacaccaccacacccaactaatttctgtattttttagtagagagagggtttcaccatattgaccaggctggtctcaaactcctgaccttgtgattcgcccacctcagcctcccaaagtgctgggattacaggcgtgagccaccgtacccagcatagttccccctattctaaacatcttgactggccaggtgctgagccttatacctgtaatcctaccacttaggtaggccaaagcagcaggacagcttggactcgggagttggaggccagcctaggcaacatagcaagaccctgtttccaaaaataaaaaaaataaaaaataataaaaaataaaaaataaaaactgtttgaaaccaaagaaaccatattgactttgtgtagtgtatcctgcaactgatgcaagaatatattacatgtgaacatgatggaaattgaagaagccaatgttattattacctaaagtccatcttttacattaggcttcactctttgtgttctgtggtttaagacaactatgtgtcatgtatccaccatcacagtcttatagagaagtgttttactgccctcaaaatcccctgtgctccttctaatcatacctctcccctccctcttttgccacccctatttatccctggcaacaaatgatgatgttcctgcctctagagttttgcattttccagaatatcacatatttggaatgatactgtaagtggccatttcagacttgcttctttcatgtaaaaatatgctttgaaggtctctaaatacctttgttgcttgacaactcatttattttttatttttctttctttatctaaagatttttgttttgtgagagacagggtctcaaactccccagctcaggtgatcctcccgcctcagcttcccaaagtgcctgaattccacttgtgagccaccatgtccggccactgattttcttttttttttcttttcttttcttttctttttttttttttttgagacagagtttcactcttcttgcccaggctggagttcattggtgcaatcttggctcactgcaccctccacctcccaggttcaagcaattctcctgcctctgcctcccgagtagctgggattacaggcatgcaccatcacgcccggctgattttgtatttttagtagagacggggtttctccatgttgaggctggtctcgaactcctgacctcaggtgatccacccgctcggcctcccaaagtgctgggattacaggcgtgagccaccgcacgcggccagggccactcattttctttcatcactgaataacattctattgtacggatgttaccatagtttgtttctttattcacctgttgaaaggctcatcttgagcctggtgtcacgcctcatccctgagttcccagcacatgggagactgagatgagattgcttaaggccagaagttagagaacagcctggtagataccgtgtgagaccttatctattttttttttttaagactcaccttgtttgattctagtttttggcagttatgagtaaggctgctaaaaacgtttgtgggaggactttcgtgtggacatcagtttttagttcatttgagtcaatatgtaggaatgagactactgaatcagtaagaccatgcctattttcttcagagctccgcagactgtcttccaaattggctgtagaattttccattcacatccctagtgaaggagagttcactgtctccagcatttggaagtgtcagtgttttggattttagctactccaccaggtatttgctggtgcttcattgttgttttccttttttaattttttttccttttttttttttttttggagacagagtttcaaatcttgttgcccggaccggagtacaatggtgcgatctcagctcactgcagcctctgcctcccgggtttaagcgattctcctgactcagactcccgaatagctgggattacaggtgtatgctgccacacatggccactgtttgtattattagtagagacagagtttcactgtgttggccaggctggtctcaaacttttgacctcaggtgatcaacctgcctcagcttcccaaagagctggattacaggcatgagccactgcgcccgggctgttttcatttgctctttaataacatgtaatgtagagcatcctgtcatatgtttgtttgccataattacattctttagcgggaggtatacttggaaagattgggcttttttttttttttgagactgagtctggctctgtcacccaggctggagggcagtggcgtaatcttggctcactgcaacctctgtctcccgggttccagtgattctcctgcctcagcctcctgagtaactgggattacaggctcatgccaccaggcccggctaatttttgtatttttactagagacggggtttcaccatgttagtcaggctggtctcaaactcctgacctcggtgatccacccgtctctgcctcccaaagtgctgggattaaggcatgagccaccgcacccagcgttttgcttattttttgattggttggtttttttcttatagaattttaggagttcttcataccttttgggtaccagttcttgatcagatagctgttctgcaaatattttgtcccagtctgccgcctgtctttttattctgttaacagtcttttccaaaacatttttgttttgaatgaagtccaatttattgattttctcattcacagatcatgctttttgtgttgtgtgtgaaatcttattgccaaatcaaggtcgtcttggttttgacaagtgtgaaattgtgagttttgcattttccatataagtaaacgattcattaggaagtagttttgtaaaaggtgcagttctgtgtctaattcatttctttgcatttgctaattcaggtgtttcaataccatttgttttgtgccaccatgtctaattttttattttattatggagacgggtatctccttatgttgcccaggctggtctcgaactgcggggctcaaatgatctgtccgccttggcctccagcttgcatttttaatacacgtctttatagtagatttttctgtgttcctagtgcctctcttgtcatcttatggaatcttctcttatatatttagtttattgagtgtttctaatcatcaggagatattaacttatttatgctggaggttgcacttttttgaattgccgacgtgtgaaaaatcagactttggccatgaccttgagcagtaggatataaataactcccacatgcttagcgttccaaaaatggaacactaggcataaattggttaaggcttgtcagatgccttttctgcctctattaaggacattcttgtggtgttttgtttgtttgtttaaagatagagtctcactctgttgccccggctggagtgcagtagcgcaatctcggctcactgcaacctctgcctcccagattcaaatgattctccacgtcccagtcaagtgactgggactacatgtgccaccacgcctggctaatttttgtattttttagagatggagttccaccacgttggccaggctggtctcaaactgctgacctcaagtgatcttcccacctcaacctcccaaagtgctgggattataggcatgagccaccatgcctggctgctaccatgatttattatcattacttatcttaaaacaaaatgtaaaacttatcagcttaagaaattttacatgtacagttgagatagtttgacaaatctacataagttctctaagatgaattctattgtattttgcttttttcaattatcccgaggtgtcatgcatgttgtagtttagtccaagatgttattttttctttttctttttttttttttttgaatcaagtttcactcttgttgcccaggctggagtgcaatggtgcaatcttggctcaccacaacctccacctcccagcttcaagcaattctcctgcctcagcctcctgagtagctgggtttacaggaaagcgccattacacccggataattttgtatttttagtagaaatggggtttctccatgctggtcaggctgatcttgaactccaaccctcaggtgatctgcctaccttggccttccaaagtgctgggattacaggcatgagccaccacgcctggctaagatgtcattttctaagagtaaataatatcccattttatgtatatgcttaccacattttgtttttacattcagccatcaatggatatgtgggtggctgcattgctcattactgccacctcaggaaggtcgtatagtggttaaatctgtgcttatgatacctgggtatctcttaggagtttcttgtttgccctcttgtgtacatacggtgccaggttttgcttaggaatgtcccctttgccctatcagcatctatctagctacattctgacaggataactgcaaagtgaatgattcctgggcatcataatggaagtttctttctacctaggtgattcccctcctctctgcttatatctagcatgcctgatttgggtggtccctgggggtgtgggatttcccaggggctccccctcctgctctttgctacctacatgcttcctctgacaatatcatcaaagattacactttgagaacaggcattttcaaggatacacagcctcaggactgctaatgttaactttgttttgcctatgaattcgtaggactctatcatgacaggtgctacagacccacagtccaaagagacattagggacagcccaggcaacccgcttttctccctgggttcggtaaatacatttcctatcctgctgtggctttagcccttgttcagttctagcatcacaattgctttatgaactagccaggtgtggtggcacatgcctgtggtctcaactactcaggaggctgaggcatgagaattgcatgaacccaggagtaagaggttgtagtgagccaagatggtgccactacactccagcctgggtaacagaatgagacgctgtcttaaaaaaaaaaacaactgctagctgggcatggtggctcatgcctgtaatcccagaactttgggagcctgaggcaggcagatcacctgaggtcggcagcctgaccaacgtggagagactctgtctctactaaaaatacaacattagccaggcatggtggcatatgcctgtaatcttagctactcaggaggctgaggaagaagaagtgctagaaccccggcagtgagccgagatcatgccattgcactgcagcctgggcaacaagagtgaaaaaaaaaacaagttgctttgtggaagaaagtaagtatacacagggagaaagagatctgatgaccaaagcagggaatacgtgtttggagtccacggcatcctgagaacttcttgggaatagagtctaggcccccagtgctgtcactctcacccatcttcttctacacatgtgagatgtttcaggacccagtggcttttaaggatgtggctgtgaacttcacccaggaggagtgggctttgctggatatttcccagaggaaactctacagggaagtgatgctggaaactttcaggaacctgacctctttaggtaaggatgacaatattccttccctcagtccattagtgaaccagtgtttctagctcattaatgctgttgagtgatttagaacatagacaggaaatactttgatgaataaatgaggtatggctgcagtaaatcatgggcgtagaatctaataattttttcacaattttatactgcctcaggactattttttctgtgtctgtattttaggaaaaaggtggaaagaccagaacattgaatatgagcaccaaaaccccaggagaaacttcaggtaatttgtacttacaagacaaagcagtgtctctctagacaatcttagaatatgacaatatattaaaaataagtaaaacaaagaactaagtccaggatcaaattcatttatttttagaatatttgatcaaaaaacatatatgtaaatgtgacctaggctgtgggctcactcctgtaatcccaatcctttgagaagtggagataggaggatagcttgaggccagcagttcaagaacagcctgggcaacataacgagaccacatatcaacaacagcaaaaaattagctgggcattgtggtctgtagtcccagctactcaggaggctgagtgaggcaggaggatcacttgagccagtaaaggctgcagtaagctatggtgatatcaccacactccagtgtgggcaacaggataagaccctgaaacaaaagaaaaatgacacagagtatttagtattttaaaatagtttacatgggaagagtattaagataccccatataaacagttttttaaataataggtatggctgggtcaccttgtagaatatgttgtccagtcaccttcaaacaattcagacagggcagaaagcctacactttgatggagagtgttaaaaatgcaagtgcaatacttgttgattaatatagaagtacttataaacaaacccttcataatatgcttctcatttttgacaggagtctcatagaagaaaaagtcaatgaaattaaagatgacagtcattgtggagaaacttttaccccagttccagatgacagactgaacttccaggagaagaaagcttctcctgaagtaaaatcatgtgaaagctttgtgtgtggagaagttggcctaggtaactcatcttttaatatgaacatcagaggtgacattggacacaaggcatatgagtatcaggaatatggaccaaagccatgtaagtgtcaacaacctaaaaaagccttcagataccgcccctcctttagaacacaagaaagggatcacactggagagaaacccaatgcttgtaaagtatgtggaaaaacctttatttcccattcaagtgttcgaagacacatggtaatgcacagtggggatggaccttataaatgtaagttttgtgggaaagcattccattgtctcagattatatcttatccatgaaagaattcacactggagagaaaccatgtgaatgtaaacagtgtggtaaatcctttagttattctgctacccatcgaatacataaaagaactcacactggagaaaagccttatgaatatcaggagtgtgggaaagcatttcatagtcccagatcctatcgtagacatgaaaggattcacatgggagaaaaggcttatcaatgtaaggaatgtggaaaagcattcacgtgtccccgttatgttcgtatacatgaaaggacccactctaggaaaaatctctatgaatgtaagcagtgtgggaaagcattatcctctcttacaagttttcaaacacacgtaagattgcactctggagaaagaccttatgaatgtaagatatgtggaaaagacttttgttctgtgaattcatttcaaagacatgaaaaaattcacagtggagagaaaccctataaatgtaagcagtgtggtaaagccttccctcattccagttcccttcgatatcatgaaaggactcacactggagagaaaccctatgagtgtaagcaatgtgggaaagccttcagatctgcctcacaccttcgagtgcatggtaggactcacactggagagaaaccgtatgaatgtaaggaatgtgggaaagccttcagatatgtgaataaccttcaaagtcatgaaaggacacaaacacacataagaatacactctggagaaagacgttataaatgtaagatatgtgggaaaggcttttattgtcccaaatcatttcaaagacatgaaaaaactcacactggagagaaactctatgaatgcaagcaacgttcagtagttccttcagtagttccagttccttttgatatcatgaaaggactcacactggagagaagccctataaatgcgagcaatgtgggaaagccttcagagctgtgtcaatcctttgaatgcatggtaggactcaccctgaagagaaaccctatgagtgtgagcaatgacggaaagccttcagatctgccccacacctttgaatacgtggtaggacacacaatggagagaagccctatgcatgtaaggaatgtgggaaacccttcggatctgcccagaaccttcgaattcatgaaaggacacaaacacacataatgcactctgtagagagaccttataaatgtaagatatgtgggaggggcttttattctgccaagtcatttcaaatacatgaaaaatcttacactggagagaaaccctatgagtgtaagcaatgtgggaaagcctttgtttccttcacttcctttcgatatcatgaaaggactcacactggagagaacccctatgagtgtaagcaatttgggaaagccttcagatctgtcaaaaatcttcgatttcataaaaggacacacactggagagaaaccctgtgaatgtaagaaatgtagaaaagcattccataatttctcttctttgcaaatacatgaaaggatgcacagaggagagaagctctgtgaatgtaagcattgtgggaaagcattcatatctgccaagatcctttgaatacatgcaagaacacacaatggagagaaaccctatgaatgtaaagaatgcagaaaagcattcagcttgcctacttcctttcatagacatgaaaagactcacactggaaggaaacactatgaatgcaagcaatgtggcaaagctttcacttcttccagttcttttcaatatcatgaaagaacacactagggagaaaccctatcaatgtaagcaatgtgcaaaagcctttatttcttccacttcttttcaatatcatgaaaggactcacatgggagagaaaccctatgagtgtatgccaagtgggaaagccttcatttcttctagttcccttcaatatcatgaaaggactcacactggagagaagccctatgaatataagcaatgtgggaaagccttcagatcagcctcgcaccttcaaatgcatggaaggactcacactggagaaaaaccctatgaatgtaagcagtatgggaaagcgttcagacctgacaagattctttgaatacagataatgaatgtaaacaattaactgtttataataactgtatactaacaaatgatattctttttaaataagaagctataatatcccattggtgtcatgtattagatcagccttatactgttaaattgttattatttggacattgtgagtcagtataaccatgtggataaaatgccagacatctttttattcgaaaattttacttttcatgcttctgtacttacatttttatctcaaccttaatttttctttctttttttttttcccccagaaagaatctcactctgtcacccaggctggagtgcagtggcatgatctcaggtcactgcaacctctgcctccagggttcaagcaattctcctgcctcagtctcctgagtagctgggactacaggcatgcgccaccatgccaggctaattttttgtattttttagtagagacggggtttcaccatattggctaggctggtctcaaactccagacctcatgatttacccacctcggcctcccaaaatgctgggattacagacatgaaccatcatgcccagctgcaaccctaatttttcattcagtcataataccaatagttatctcatgcacctctgagtgccttcttccccaaaaccagcagtgccatacctgctgtcagcaagggtgtaatataccatagtgataaatatgaccaaaagccataaatgactgtgagatgtatgagaattacaagtcacattagtaagaagagaaaaattttggtcatgtttatgatttgaaatacgttttcctctatcacatttaaaaatatagttacaaaatgcccttgtttttgtcctgattcatcatggtcactgaggagcatcgtctcatatgcctggtatgtgacacgtgtctctccaacaataaaagacttggccttggctgggcatggtggctcacgcctgtaatcccagcactttgggaggccgaggtcaggagttagagaccattctgaccaatatgatcaaaccccgtctctactaaaaatacaaaagttagcagggcgtggtggcatgctcctgtaatcctagctattcaggaggctgacataggagaattgcttgaatataggaagcagaggttgcagtgagccgaggttgcaccattgtactccagcctgggcaacaagagtgaaactctgtcttaaaaaacacaaaaaaagacttggccttagggccgagtgcggtggctcacgcctataatcccagcactttgggaggccgaggcgggcggatcactaggtcaggaaatggagaccatcctggccaacacagtgaaacccagtctctactaaaaaatacaaaaaattagtgaggcgtggtctcaggctcctgcagtcccagctacttgggaggctgaggcaggagaatggtgtgaacctgtgaggtggagcttgcagtgagccaagatcgcgccattgcactccaacctggacgacagagcaagactccatctcaaaaaaaaaaaaaaaaaaaaaaagacttggccttgtggtgaggggagggcatctgtaaactcctggacctgtttttgccttacttattctctaaagactaaaatatttcctaaaatgtacaggcactgtttaccagaaagtaccttagttaaaacatataaatttgtttatgccttataaagctatattttttcaaattgctttactgagtcataggaggctaataaatttgtgtaaattgtctaaatacaagcctgtcttatatttctctgataatgtgctgctgataatgtgctgctgaggctaactttctctgataatgtgctgctgaggttaacttgtcaacagcctgcttatctcagcagtgtaaagttaacagcaacatggaaaagtttcttttatatattatgcaatggcatagagcaattcagtcacttcctttaaggttccaatgaagctgctctttaggaacgcttatttcaaactccctaaggtcaaaatccaggcaccacaagatgcagcatcagccactgaccaaaccctgtctgtgtgtggagatgacacacccagtcccagataatgtatccacaccagtgaagggtggagtcgttgattgtcagatcacacaaagtgactcagagcagggaagacagggcagtgaaacctgatcaggcacagtggctcacacctgtaatcccaccactttgctagtccaaagcgggtggatcacttgaggtcaggagttcaagacaagcctggtcaacatggtgaaaccctgtctctactaaaaatacaaaaactagctgggcatcgtggtgtgtgcctgtaatcccagctaatcaggatgctgaggcaggagaatggcttgagcctggagacagaggttacagtgaactgagatcacaccattgcactctccagcctagtcgacacagcgagactctgtctccagaagaaaaaaagaaagagttggatgcacctgaatccaacccctgcctcatccttctcccttgaaggccaaatacaccctgatacttttcaccaaagagtagaaacaacaccattcacttgaccccaaatgtgactttccacaggatgcaaacacagtgttggaatggccaatgacaatgacaatgaaaatgcaggctgagggtgatgaacaggacacactggagagcctgacatcggcctagactatgggggtgtcttgatgcttcacaaagagcccaaggagcaccccaaagaggacactggagcacaggcccaaagggtgttcacatgccaggaaggccactaattttgaaagtcagggacattggtgcctgcttgagtcctgatgctttatctataacatatgcttttctgcatctggttagacaaggaaatctgaaatttttgtttcagcatttagaaataagttatttaagcaatcctcacactcatggtttattctggaactaccttcagacacacagctacagatagggtatataatgagtatttccaaggctacactctgtaggaaaaaacttcatgaagtcagtgggaccctctcatgggagggttttaagacccacaatcaaaaaggtggggaaacattagagtggaaggagggcagcagaaggtcaaggactttcccggaggcctaacatacccaacattattaccctagatgaaaaccaaatacatatcctaacaccacatactctcttcaatgtttaacagacaaaatgaaatgtattcaaagctaagcttccagaattccactttacgctattaatgatgttttaatatccctcaatgtgttgatattaggacatttttaaatatgaataccattttctggttatatatggaaaatatcttgatttctgagatacaaaaatgctcatttttagatatacatggtcttgcactttttttataaaataaggtgaaaagacaggaaaaattttttcagatcatggaacttggattaataggagaagagtcatacaaatttatttaacatgtatatatgggagccttcagaatgaagacccacccaacaataagacaaaaaagcttatattaccattctgaggccaagaaagaatgcagacttggctggccaaaaaatcccgggtttggtgggtaagtcaggtttaatggcaagacagattagggaagaggaaaggaagaagcttacctcctgtgtagctaaggagaccttgttatgtagatgaaggctccctcatagagaataggtgggaaatgctgcttttcagacttttatttagacttttaagtaatagggacaggattatgctatgttgcccaggctgttatctaattctttttctcaagcaatcctcccagctcagtctccgaaagtgctaggattacaagcatgagccgccatacccagacagggtttgttcccttgtaaagaattatttgttgctggacacagtggctcacagaggccaaggaaggaggatcacttgagcccaggagctcaagacctgccatggcaacatgacaaaacctcttctctacaaaaaatacaaaaaattagctggatatggtggcacgtacctgtactcccagctatccaggaggctgaggcagaaggataacctgagcctgggagattgatgctgcagtgaactgtgattgcagcactgcactccggcctgggccacagagtgagagcccttctaaaaaaaaaaaaaatatatatatatatatatatatatttgttcacttattgcagcttcagatttttaaaattaattgtaaattgcattttcactacagctggaaaaataagaaaattttgcacagagccaagataaaaatagatgtcagaaataaatcattagtcttatatagcatttgtttcaaaaaaaaaattttttttttttgagacaaagtctcgctctctcacccaggctggaatgcattggtgtgatctcggggcattgcaacctctgcctcctgggttcaagtgattctcctgcctcagcctcctgagtagctgggatcacaggcacgtgccaccacacctggctaatttttgtatttttagtagagatggggtttcacgatattggccaagctggtctcgaactcctggccttgttatccacaagccttggcctcccaaagtgctgggattacaggcgtgagccaccgcacccagtctcaaaattcttaatttttttcttcttcagatgtggtgtagtacatttcttaagtctgtccttttttgtggatgatttctttatttctttttctttctttctttcctttttttttttttaagatagggtctggctttgttgcccagactgggatgaggtagcacaatctcagctcactgcaatctccatcttccaggcacaagctatcctcccacctcagcctccgtagtagctgagaccacaggcacacaccactacacccaaagtgctggtattacaagtttgagccacagtgcatggccatttttggatgatttgtaacagagtttcagggcatagcgttgagaatgctgattgggaaaagaaatagagaaaatcttttattacagcttgagaaaatgaataatcttccacaataaagtatagtagataaattggtgaattacaaagattcagcaaaataccagtcctcctttgcaggttggggaacttgtaatggtggataactcttcttcttcctgttatctgtggggtaagacctggctggcaactgttgtcatatgtttgtgttcacatatgattaatgtgtagtatgtgctttgttatcatggaaataataatgaaataatattgtgcaccttaataagataataagattcagagaatatgattaaatgctgagtttatctgagcacatagtttgaggatagccactggggaaacagatatcctgaagagtggggtcagtgctccaacacggggaatttgagtcttctcttctatagggcaaaatgaagcttaacagggtgacattttccatacaaggccggtgcacacatttcagtgatttgataggttgcagctaccaaatttcaaggatgattgctttaacttttttttttggatggagtcttgttcggtcgcccaggctggagtgcaatggcgcaatctcagctcactgcaacctccacctcccgggttcaagcaattctcctgcctcagactcctgagtagctgggattacaggcacgtgccaccatgcccggctaattttagtatttttagtaaagacggagttcaccatgttggtcaggctggtctcaaactcctgacctcatgatccgcctgcctcggcctcccaaagtgctgggattacaggtgtgagccactgcagccggcctgctttaactttttgtaaggaggggtagtggtctcaaaaggatcctacctctggcacttctctgtcttttctaatcatttacagcctaagaacaaggaagagaatctttttgacatgcacagggaaggagcaattacatagtagtgtaaacacatttctcaatatgtttattgactgaaagggttagatacttttattttccctgatgaggatgaaaggtaagtgccttataaattcctgcctgcctgtaaacataaactgagtttgagagattttgctggattcttcaaacagtgggtattttctcattgaaacagaggcctgagtccagggactgcaagctaaggccaatgacaagcctacaaagagaggtcattgaaagctcacaccaggcgcattggctcacacttataatcccagcactttgggaggccaaggtgggcaaatcatgtgaggtcgggagttcgagaccaatctggtcaacatgacgaaatcccatctctactaaaaatacaaaaattagccgggtgtattggctcacgcctgtaatcccatcccttaggaggctgaggcatgagaatcgcttgaactcgggaggcggaggttacagtgagctgagatcatgtcattgcattctagcctgggcgacagagctagactctgtctcaaaggaaaaaaaaaaaaaaaagaaagctcacttggttcttcccctgcaggtgccccagctactcacattgaccatgggaggagccctttatactgagagaatctgagatccttggaaagctagggatccacaggcagatacggtagtcagtgatgccctccacaagtgataatttttgtcatggggcttttcctagacatttgtagtgaaacaaatgtgagtttaggtaagaaataacttttaattctagaccttgaagccagcttgtcctgcgggttgagcacggtggctcacgcctgtaatcccagcactttgggaggcccaggcaggttgatgatgaggtcaagagattgaaaccatcctggccaacatggtgaagccctgtctgtactaaaaatacaaaatttagctgggtgtagtggcacatgcgtgtagtcccagctactcaggaggctaaggcaggagaatcgcttgaccatgggaggcggaggttgcagtcagccgagatcatgccactgcacttcagcctggtgacagagcaagactctgtatcaaagaaaaaaaataaagacgtcagcttgccattaggagaggtcataaaaggagtctaggtactgaacttgtaagtaaaaaaaaattttaaataaggccaggcccagtggctcacacctgtaatcccagcacttcaggaggctgaggcaggcaggtcaccccaggtcaggagttcaagaccatcctggccaacatggagaaaccctgtctctactgaaaatagaaaaattcgctgggtgtggtggcgggcgcctgtagtcccagctactcggaaggctgaggcacaagaatcgcttgaacccgggaggtggaggttgcaatgagccaagatcacgccattgtaatccagcctgggtggaagagctagacttcgtccccccgaaaaataaataaataaataaataaataaatggggttgtatataggcttagaatgggtcagtcagaaattcaggggccactggtcgtggtggctcatgcccataatctcagcacttggggaggctgaggtgggcagatcacttgaggtcagaagacaagtgtggccagcatgatgaaaacccatctctacgaaaagtataaaaattaactgggcatgatggcacacacctgtaaacccagctactctggcgactgaggcatgagaatcacttgaacaccagggaggcggaggttgcagtgagccaagatcatgctactgcactccagcctgggctacagaacaagactgtctcaaaaaaagaaaaaagttcagggacctggaggtaggagagaaactgaagcatgctttggttaatagatatttcgttctgactgatcactaaagacaaagctattcacctaatggtttgtgaggtaaatactggaatgtctaatctgtatctggtttgtcataggtaacaaacgtggcacaatctaagtcataatgcgaagggtgtttcattgcagtaaggtgctcttgcacaacacaaagggtgggggattctttttttttttcttctttttttttgagacagagtctcgctctgttgcccagggtggagtagagtggcgcagtctcggctcactgcaacctctgcctcccaggttcaaacgattctccttgctcagcctcctgagtagctgggactacaggcacatgccacctcaccctgctcatttttgtgtgtgtttttagtagtgacggagtttcaccgtgttgatcaggctggtctcaaagtcctgacctcaagtgatccacctgcctcagcctcccgaagttctaggattacaggcattagccattgcacctggccacatttaagaattttattttatgatttgggtgttaggattttaattagctggttggaaacttagtgaatagtttgataatgtttgaagaaggaaaatgagttcttgaaataagctgttttatgccaagtcaaaataataaaaatatgaatactcagacacataccaccccaaaaaataaataggccttgggcatttctggtgtgtctcacttatttttgatacgcaaaggtgaccaaagttttgattcttttcgttattctttgtagctttgtcatctctttgtcacaaagcagaattttgccacttttgaatttttagtaacagaatattaccattaatacaccattagtattatgctgagagggtgtctttctggttttcttgcctgagcctgttgcaaacatgctgctccgtgaagttgtgggtcacgtaattgacttgcccattccactacttaatggcacttgagttggttcaagtttatcttttgatcttattgacaatgctcttcttgtttttattcctaattggaaatacaacagaaatttttacacattgggaaacaattgctgggttgtagattatggataaattcaaatttactaggaaatgtggatagagtatgaatgtaacttatgagttaaccatctcacctttcatgcatgtgtctttattcttgtgatttgccaacactttgaattatctaactcactttttgttgcccgtctactcttagacagaatttctgtgtttctttttgctttttacttgctgccgttggttgagcatttttcttatatgatctttcatcttctgtgtagcagattccagtcatcctcttacatttgactaatttgtagggtttttttttccttttttctttttttttaatttgagacagtcttgctctgtagcccagatggagtgcagtggtcactcactgctcactgtagcatcaggctcgtgggcttgagcaatcctcccacctcagctttctgcccagttaattttaaaaaatttttttgtggagacagggatctcactgttttgcccaggctgctctcgaactcctgggctcaatcaattctcctgcctcggcctcccaaagtgctgggattgcaaataggagccaccacactcagcaatgagggtttttttttttgttttaaacaagatatccgtacatgtttctgaccaatattttatttaaaatctttaagaactacatattaacaaaggttattctgtttttcattttctgttttccattttcattatgactacttgtttttctttcttattctcatttttttcctagatcattacaataattttccatgtagtggccctggcatgcattttgatccttcatgcaatcatacagctacctcgatgtccattctctctgccattctgaaattggacctcactcctttttgactctagctctccatctgctatgtgataaagtcctgtcttgtgatggttactatgggactgaatgaagaagggcagatgcagaaataaagacaaaagatctatgttaaagaagggatcagggggctccttgcttctagtgagcaagggccctgagcttctatagccctttgtttttattgggtagaaagagcagggaggaggaggtaatggttggtcagctgcttgatttatcacaggttcacatgattactttctttgtacaacaggcttcagatgtgcctgtagataatcacaagaaacactgcgcttggggagtaactgccctcagcattctttctgggtggcagacgtagtttgtcagtttgccaacaagctgcattcatgagaagagtttgctgtttgctcattagcctccagtggtatactgagttgatcaggacccccattctttcagcctccaacactgtctgattacattgtttccaaagcctcttttatggacttctgtttaccccttggcgtgtcctgcatttactctcctcaaaatgtgtacttagaggccgggtgcggtggttcatgcctgtaatcccagtactttgggaggccaaggcaggaggatcccttgagcccaggagtttaaaaccagcctgggccacactgggagaccctgtctctaaaataaaatgtatacttacaagccctaaaccccaacagggtcatatttggacacagaccttttaggagatcacatacatttataaaggagagccctcataatgggattagtaagaagagagagaattctctgtttctccagcatgggaggacaaagcaagaaggcatctagctgtaagccaggaagatagccttcactgggaacaaaattgctggcagcaagattttggacttcccgcactccagaattgtgagaaacaaatgtttgccgtttaagaaactgagtccatggtatgagtccatggtattttgttataccagcctgagctaagtcaccccaagagtcctcacattaaccatatactgtcgtacaagtgctgcatttggatctacctggaatgtctccaagtcttctacttttcctcttggacccattgtgagaataggttttgcttcataggcaactgctggtgatagtagtgatagcccataacaactagggagttaaagaaacttcctttctctctctctctctctctgtttttgaaatggagtttttgctcttgttgcccaggctggagtgcaatggcacgatatcgggtcactgcaacttctgcctcctgggttcaagtgattctcctgcgtcagcctcccgagtagcttggattacaggtgtgcaccaccacgcctggataattttcgttttgttagttacagacggggtttcaccatgttggccagcttggtctcgaactcttgacctcaggtgatccacctgccttggcctcccaaagcgctaagattacaggtgtgaaccactgtgctcggcctcttttatatgtgtgtgtatatatatatattctcttttttaataaaagtaaatagaaactaggtcttactatgttgcccagggtggtcatagcccaagattttgggctcaagcgatctacccgcctcgctcacccaaagtgctgagattaaggcgtgagaaactgtgccaggccaaatgaaagaaacttagtgggaggcctggcacagtggctcacacctgtaatcccagcactttgggaggctgaggcgggtggatcacttgagctcaggagttcaagaccagcctggacagcatgttgaaaccctgtctttactaaaaatacaaaaaattagccgagcatggtaatcccattctcacagtcatagaaaggttcttttttaaggattctacctacttgagagcatcatatactgccagcacttgttcacttcaagagtgtctggtttcatctctatgacataattacaaccaaaatcctaaaggaactgatttaccacactgtgtttgccataaggcccaatttgtacctgcagcagcagctgtatcatcccaactcacagctctaccctctaaaggtgtgcctgaggcttgtgatccagtccatagggaaatatcactacctgctgtgttttataattggaccatccaagggttgtcagggttttcccagagagttttgtgggatttttttttttttttgagaccaggtcttgctgaagttagtatggcagcatactaacacattaacctgtcgaaagcttcctgcagagctgtgtcccagtctcaaagtgcccctttctaataattctatatattggtatcaaactttgggctaagtgtcagataaatgctctccaataatccaaagaccaacaaatgtctggatttcttttttcttttttgttttttaagagacatagtgtggttctgtttcccaggctggagtgcagtggtgggatcatatagctcactgcagaaactcctgggatcaagggatcctcctgcctcagcctcccaagtagcagggaataaaggcacatgccaccatgcccaattgtttataaatttttttgtacagatggagtctcactgtattttccaggctgttcttgaacgcccaggctcaagtgattccccaacctcagcctcccaaagtgctgagattacagtcatgaaccaatgcacccagccctgaaaaggaaatatttcgaatggaaattcaaagggagaacatctaatgttcaagttgatgtctatagagcagttaacgggaactatcatttagggtctgtgggattctaggacactaggtatgaaacaaatatgaggaaggtcagagaacaagctgacttaatgattaatgctgaaggtgctgccagcttggtttaagttttcctcctcccttcctccctgatgaatttgataaagtttaaagggatggtttcaccaggggccttttacattgacagcaaggaggtcatccgcctggtaaatcctcagtagtccaagcctcttacatggctagaatgatccagtccataaggaaacgtcaccaccctctgtgttttacaattagaccatccaagggggtcagggtttccccagggaatttggtgggatttttttttttttgagaccgtgtcttgctgaagtacagtagcctgatcaaagctcacagcagcctcaaactttggggctcgagtaatcctcctgcctcaggctcctgagtagctgagactaagggtacacaccacctctccaggctaataaaaaaaaaattatggagatgggagtgtctcacttcactgctcagggtggtcttcaacttcgggcttcaagtgatcctcccactttggcctcctaaaatgttgggattgcaggtgtaagccatggcacccggcctcccaggctgttgttgaaaggtctttgcaatctctaagagttctgcagcagtttattccctgacagtgagagtctcatcctttcaccccattttgcagcagtagttgggtgttcacttttctttccataaggaagcgagcttgccagtgaccctcatccccctcctcatcgatgacttctttgtcatcagagccttcctcttcataaattcccacggaatccaagttttcacgtcccaaattatgatagccacaggccctcaccagctgccatagcaccccatttcatggaagccacctgactcttctttgagcatcctgtcccaggagcccccatctgtgctctcccgggctccaggccctagagccgcgctgctgcagagcccagttcccagggctgctccctccacgtatccacatccatctccagctttccaccctttctctgaccagacaggcctggaggtgctgcagtgtcagtgaccgtgggtccctccgctgccacctccaccgcgatctggaagtcttttaaatgtacttaagttatcttagaattttccttccccactttatacataaacataggaggagagcagggactctgctggtgtcttattcacacaatgggattgagggtgtttgtgtcatggaactgatcaatggggtgagaagtagctgaataacctgcaggggcagcagagcccgaggccagtgactccacgctgaggccagtctggagcctgcaaaggaagggaaaggagcttttcctgggggcttcctgggcagcccgccctcccctacaggtggcctccagctgctcagagcagctccagaaggagtgtggattccgagaagctgtagggccctggaaagcagaagaccttcgtgcagacgcatttgtggggttctgtcctttctggtgttgtacctctggagcctggggctgtcttctgggcagggtttggggtttgacatacatggggtcgctggagtcagagttatttgtatatataaagaaaatgtgtgaaaatcaggctagagacacaattgtttggtggcgtcacctggataaaaggtttatgaggttgacagtttatttaggtccgaagcttaaccccaggtgagagtttcctgcaggtgaaaatgaagatctggaaggacggagcattttcatactgtgaggaggggatgggggtgtgtgagcaagtcttggccatgcctcatccccaattccggcccgctcgaggaaatatgcctctcctcctggtgcagtcttgcctggcctggtctcggttcccctgctgctctgaggcaggagatggctcctgtggacactgagtctgaaattccctgcacactcctgtgaccccgtgcagaacgaaggagcggggacagtcctttgagtgaggaagacgctagtgttctcttctaacaatagcaagtttggctgaaatgcaactatccaataacccgagtgcaggaagcagctcgtgtaagcttagagaagctgttgctagaatctgtcagtctggctccgcagggcctgatacccagggcttccgctgtcacttagacgtggggggcggggccgaacattccatccaatcagaggcactggctcggggccctgcccactgtgcatccaggcacggaggatgttgcattcctgccgtcacctttgtcgctgcgagggcggcggttgggatctggcctttccagccccgagagggacctagtgcctctacccagatttctgtcgctctgtcacctgcgctatgccctgctttactcacaggagctgtagagaggaccccggtacatctgaaagccgggaaatggtgcgtgtgctggccgggagtggtgcgatgggggaggggctgcctggaactggcgggacccgggcctccctgtgggcgactccggggtctgggaccgagtcctcctagagctgctcggccctcggtccccgcggccgctggatgtgggtgggccggcagccgggactccgggcgtcctgtcccgtccctgcccgtcgactgcggccttggccccgaagcccttttgtgcagctccgcgcccgcagcccgacgccccagcttgtgcgggggccacgggagggtcatgcgcggatttcgactcgggtgtggatttcgtccgtaggaggagcagcggtctgtggggcccacagcctccactttctcctgttaaaaattatactgaggtacgttaacaaaaagttcatttgaggaaacagccattcacgaatgagaaacacccggtcctggcttgtggtttgtcaacggaaaaaaaacagactatgtaaaatacagaagtgtattcagagccgagtaggagagaccttggccgagggaaacacaaccccaagcagcctggagtaagtggtccggaggcggctcaggacagtttggttttattcatttcagagagacaggaattgcagggaaaatgatggatcaaggctggaaggtgtaaattccattggcagaaagggtgggacctgtggaaggggggttaggaggcacaggtggttgagggattctgtaggtggcagctggttgagagtgtgaagctttgtctaaagtttggaggaggtaggaaggaatgctgaaggaagggggtctgttatctgccacttcattccatcccagccaaaaaacagtcctgtttctctagattttatgaattctaagacgtaactttacctttgccttgcgtggccttaggtcttgtttgtaatttggtatcttgttgccacaaggagtctgtttttccagtcagagaatgtctgtttttacatgaatgtgcgtcagttgctgcatgtaaactcctaaagggagagggtataaggagacctgtctcacctcccatcctgtcatacagaggcactcaattttcagggtgttttgggggttcccttggccaagagccagtcacttcacttagctgggaaggtactttgtttgtttttgtttttgtttgagacggagtctccttctgtcgcccaggctggtgtgcaatggctcgatctcggctcactgcaacctctgccttctgggttcaagggattctcctgcctcagcctcctgagtagctgggattacaggcacgcaccaccacccccagctaattgttgtatttttagtagagatggggtttcaccatgttggccaggctgttctcaaactcctgacctcaagtgatccacccccctcggcctcccaaagtgctgggattacagatgtgagccacatcgccatgccagaagatatgtttttatttttgttttacatgtttaaggctaggcttttataaggtacatgaggagacaaaccagataaatgcttgattggttgcagagatgcagtcgccttatttggacttgtcaaccggaaataatcaaaaggttcagatttcagttggaagagtttattcaagcagaaagatagcaatgaccaaaacacagactccagaaaaatggactcagtactccaaaattggaagttatgttcttgcttatattactgaaaaaagaggtcctgatcagaccccaagagagttcttggatctcacacaggaaggaattcaagacgagtcacaaagtgcagtgcgaagagagtttattgaaagctactctgggccagcatgatggcttaggcctgtaatccaagcactttgggaggcccaggcgagaggatcacttgagctcaggagttcgagaccagcctgggcaacttagcgaaaccccgtctcttccaaaaataagaaaaattagccggatgtggtggcctgtgcctgtagtctcagttactcaggaggctgaggtgggacaatcacttgaacctgggaggcagaggttgcagcccagccgaggatgcgccactgcactccagcctgggtaacagagtgagaccccatctcaaaaaacaaaaacaaaacaaacaaacaaaaaagagttgaagaccaacctggccaacacagcgagaccctgtctctatttaaaaaaataaaaaagaagaagaagaagaaagaaagcttctctgttacagagtagggcatcctcatacagcaagaggaggaatgtactgtcttaagtttttcttatgtagggatcttgtctatgtaaagaataaactaagctgtgcctacctgcatgtgggctgacagcatcacaaaatttattactctgttgatttaaagaaaactatcctttacattttagtgcacaagtgcattaaagcataactataattaccttgaaagcacatattatgggtattggggtattgggacatcgggacattctgtcgttgtgggagtgtaaggatacttgcaggcatcttcaggctgttttcttcatgggaaacattttatgactatgggttgtgactggcaaggagtgtttcttgttagtctcaagatggagctggttggtctttctctggctcccctaggcacctgcttccctaacacttatatagggaaacggcaaataaatataataggattacattttccatagaaggctgatgtatgaggtacaataatttaatttttttttttttttgaggcaatgtcttgctctgtggcccaggctggagcagtggtgccatcacggcttactgcagccttgacttccccatcttgagcacctccgcctcccaagtagctgagactatagtcgcccactaccacacctgggtaatttttaattttttatggaggtggggtctcgatacattgcccaggcttgtctctagctcctggcctcaaacagtcctccttctttggcctccacaagtcttgggattgcaggcgttagccagtgcacctggctaacaacttaatttgttatcgtttgcttttttcccccagagcttgttttcttttctttctagctggtttttatttccttttcaatttaaaagagtgaattcaacattccaactgaagacaatgtgatagccatgaagtctttgtgtgagaaagttaagagggaagttagtctactacagagatcagtagtgaagaggggcccagtgggatggctcacacctgtaaccccagcactttgggaggctgaggcaggtggatggcttgatctcaggagttcaagcctgggcaacatagtgagaccccccatctcaattgtgaaaaatcatattaaataaattaaaaatagcaaagagggaaagggtctttcctgtttcccttcagtcatttacaacattttataaaacagtataggtaagaaggaaggcgaatctgtaatcaaggaaagaggtgttccagctggctatttgaaagctgtgtgtcatgtgactcaaccccatgatcacattgcttcaagacagtttagagatgcaccagcttaaatatttgaattacttggttgtttttgtttgtttgtttgtcttgagacggggtctcactctgtcgtctaggctggagtgcagtggtgcaatctcagctcactgcagcctccacctcctaggttcaagtaattctcctgccttagcctcccaagtagctgggattacaggtacatgccaccatactcggctaatttttgtatttttagtaaagacagggttttatcacattggccaggctggtctccaactcctgtcctcaagtggtccacccaccttggcctcccaaagtggcgggattacaggtgtgagccaccatggctggcctgacttacttcttccaacagcctatataggtagaaaatttctagttatgtaatcagaggttaattggtggactgtgcctgattaagcataaatttcatttttctataaattagtaattttatttatttattttttttgagacgaagtttcactcttgttgcccagggtggtgtgcagtggtgcaatctcggctcactgcaacccctgccttccagtttcaagcgattctcctgcctcagcctcctgagaagctgggattacaggcgcctgccaccacgcctggctaatttttgtatttttagtagagacttggtttcaccatgttggccaggctggtctcgaactcttgacctcgtgatccacctgccttggactctcaaaagtgctgggattacaggtgtgagccaccacgcctggcctaaattagtaattttcaagagttgtatttcaatttgatttcagggtcgttaggtaccacggaccctactggattgaacaaaggaggacgaatgcgggaataaagacaaaggcaaaagaatatgtttggaacaaggggtcagggggcttcttgcttgtagtgaacgtgggccccgagcttctagcacccttcatgtttactgagtaaaggggatagagagaagcgggtggttgtaggtcagctacttgatttagagcaggcctgcatgactgcatttttcaaacaataggctccagatgtcccagtagataacctcaagcagcacagcaccagggagtgattgtcctcagtataccttctggcagcagaagcagatgtgagtttgcccacattctgcattcatgataaacagttcactgtttatcatatagccttcagtggaaagctgagttggtcacaacctttgggccttgggctcccaacatctctccctttctgtttatgcattaattgaatgaatgtaaggccaggttgggcagctctcattttctgattggcggtccatctgattttacagactatgaacaaaaaacagagactaaacaacatcattccaataactatatatgagatgttaatatagtgctttagattggtccaaatattgaggctctctaggccttgcaggaattcactccagacttctaaggaaggctgaaactcttgagtttgcttatttaagtcaagaattttgttttgcagttcaccaatatcaaaggtcccgtggatgctcactttggttgtattctaagttgtttacacaaatatgagtggcattaagatgacagcacaattgctgttgcaattgtaagctttgtgcttgttcccctaaccatagaactatggatttcaacattgccacttcagtttgtaactcagtgttaattctattatgaagtagccacacttggttggctgtatgcatccagttctgcacgtactgaactgtttgaatagaactatgcaaagtgatggagtacatcacaacagaagtttttggtgtgaccaaggaaacaatagccaaaattatcatgcctaaggctctacgggcacgatgagtaagctgagttagaagaagtttcacaaagtgcaaagcaggggtggcagcccaaggcttggacagattaatgggaatccatagcccagggatgcaacccaaaatcatcaaagtagagatattatgtgtttgtggccaggcacagtggctcacgcctgtaatcccagcactttgggaggccaaggcaggtggattacaaggtcaggagttcgagaccagcctggccaacatggtgaaaccccgtctctactaaaaatacaaaaattagccaggcatggtggcgggcacctgtaatcccagctactcaggaggctgaggcaggagaattgcttgaacccaggaggcagaggttgcagtgagccgagatcgtgccaccgcactcaagcttggcaacagagcaaggctctgtctcaaaaaaaaaaaagagatattatgtatttgcaatgtgctatgattaatgtagtgatataactgacaagatttacaggtcaattgggtattgtttacctggagctaatccttcttagctgccaaaaagacataaggattaaaaacacaaaccgtaaactgagtggtgatattctttacaagtgtagcattaaaactgtgttgcttactattgctattattggatagtatcccaaccccgatgctgccattcataaatgaaggtgctgccttccataacgtcttttggattggtccttgcctgcctggataatgccactgaggaagaggtgagctaaagcctgctccacaccaagcaatctgggcagcagactgggattggatcccggtgtggtataaagaagaagtattaaaagcttaccaccaatgccagccaagtttgtgccatgatttctaattttcatcttttccatgtagttgacctttaggtccccaatccacaatgtctgcagttaacatagattgttttctatgggccaagactctgggtccatggaggggggtaggaactatggaagggaatccattccatatagtcagcacaggtggggcgactgggccgggaatggttggttagcacaccagttacattaatggaaccaaaacataataagtacatgacttttccatagtgattccaccatgcttgagcttgaattataagacagctactgttgagtgacatctctgtggtgatacacaaagggagtccttctagtggggtggtataattgatgacattgttctaagagtctaactgttctatgccatggggagttaggggtcctggagcccacggtccctgatcatgatagatttcagaaagagcgtcactccaaagtataggccgtactgctgggggattgggaacatatgcccaatatgtttttacctctgtacagggaaaacatactgcacaggacattatggctgacaggccaagaacatggcatcaggggtttttgcctgtccctgacgctccagtagtttctcagcttcttgcatggttttcttgagttgtccccaggttatgggggttgatgtcgttgtgactccggtcagccttctctccgtcttcacactcaggctcagctggctcatgggttgtaccggagggaccaagcccattgttggccaccatgggtccctccagtttcccgttccatggtggcacgcaccttgagggcactcacatggtgtgtccatctcctgtagaaacacaagcataccttcatccccatgtcagtaaatccaccggacctttccattgtccttcttccagggatttccataacactttcagataaactttcctcttttcctctaacacttgccaatgtctttctgctggagtcttaccatccagaccaggagtcaaacaatttaaagtaaataaggctaaatgtaattttatttgaggtggtagctggtctcctataccccctttctgttttttcaacatgcattgtaatgtttgatgtgcccactctataatgccttgtcctcagggattgtaaggtattcctgttttgtgggtgattgcccataactgtaaaaagttttgaaaaacatggctaagtataagcaggtccattgtccgtttttaattgtttagggatccccatatgagcaaatgatgaccgacaatgtcaccgcacatgagcagctgtctcgcctgtttggcatgtagaatgcagcatatgagattaagtgtctatagttacatgaacatagctaagcttgccaaaggctgctatatgtgtaacatccatctgccaaatttcatttggagccaagccttgtggattgcatccttccacaggtataacaccagggacatgctgacaagtgggacaggcttgcgccatagttcgagcctggctgtgaggcaggtgaaacatacgagtaagggcgaggtgttttgaggcagtattgcctgagaagtttgagcttgttgaaatacagaacaaaccagtttatctgctctatcattacctagagatagtggtccagggagttgtatgtgagagcaaatatgagaaatatgtaaaggagcagcatgagagcgaacagcttgttgaagtcttagaaacaagctaagcagttctggctctagtgtgcttttaattgtagcagtttctatgcgactggctacatttacgacataggctgaatcacagacaatgttaatgggagttgaagctgtgagctctaaaactagaatgactgtaattaactctgagcgttgagctgaaagtccagagatccttattgtctgagtatgtttaggtcccaacatagctgcacgccctttggaagagccatcggtaaaataggcctgaccacctggaataggctcgtgatgagtaatcacagggaagataaaataatagacattataaaattgtaaaactttgtccgatggagagtggttgtctattatttccacaaaatctgcaagagcaatttgctacacagtcgatatttcccatgctgtggcctgttgttgggaatccaaggaaacaataattgcgtctggatcataccccataagcacttttaatttatgcctacctatagtcacaagttgtgtaattaaaggaagataggcttgcaaggttttaactgtttgattaggtagaaagagccattctattactgatacagacttgtctaagcactggcccaggagtcctgttggagaatgaggggtatgaagaataagcaaaggcttttgcggctacagccatgaggcatgtctctgctgaagcatctgttctacaagttgcaactcagcttctgcctctttggtcaattgctgcggggaaatctaatgaagaatctccttgcagggtttgataaagatgtttgagtcgataagttgcaatacctagcattgcgcacagccaatgaatatcccctaacaactgttgaaaatcatttaaaatctgtaacctgtctttatggagaactactttctgaggccgaacacttctttcagtaacaatagtgcctaagtaatggtatggggaagttgcttgtactttctctggaccaattttgagattccatttagtcaaagcctgcttcctttctctgaataactgatgtaagatttgatctgtaggagtggccaaaagaatgtcatccatgaaatgaatgatgtgagcagtaggaaacatattcagagtctccttcaatgtttgtcctacaaaatgctgacagcgtaggactgtaaagcatgtcttggggtaaaactttcctttgataaagagaaacaggttctcttggatgaatagaaggcacagagaaggcagatccaggcttatccttctcgtgtaagggtatagtaaagaaaggtctatgccgggcgcaatggctcacgcctgtaatcccagcactttgggaggccgaggtgggtggatcatgaggtcaggagatcaagaccatcctgcctaacatggtgaaaccccgtctttactaaaaatacaaaaaaaaaaaaaattagccaggcatggtggcaggcacctgtagtcccagctacttgggaggctgaaacaggagaatggcgtgaacccggaaggcggagcttgcagtgagccgagatcgcaccactgcactccagcctgggcgacagagcgagactccatctcggaaaaaaaaaaaaaaaagggggtctattgctacaagaggccagtctctaggaatgacggctgcagatggcaagccttgttgtaatgcacccatcagtttaatttgtgcattaatagctctcaaatcatgcagcagtcgccatcttcctgacttctttggaattacaaacactggtgaattccagtggctaaccgactcctctttatggcctgcatccagttgctctttttctactgctgaagttgagttagtttctcctgtgataggggccattgatccacccacacaggtttgtcactgagccattctaatggtaaggcagtaggtgaaggagaagtatcaatgacccccatcagaaatcctgactcctagcccttttctatctgtttgcccacttattgatataggatcagggtttccctgtagggacttttctaagccttttctgctctgatatcccattttagggtttgacccttggctctttttagatttgtcaactactaaattagccattgcttgacctaacattgtagaatgataaagctcagttcctacatcctgagaagctctgagaaaatttcccaactcttctgtatacttcacaggtgctagtgcacatttacaatctacgtttgcattctcaaaagctaaagttacggtttgcatctctgcagccatggtatgaggaatctgtttcttcactgcctcttgtaatctttcaagaaaatgtgcacagggctcctgcaacccttgcgtgatatgtaaaaaggattgtactggaaccccttcctctggaattgtggcccaggcacatttagcagccagtgcacactgcttataagcagcgtctgggagtgccatttgatgttccaggtctgaataagggccattacccaacagcatatcctctgtaatgtctctatgtccagtagcatgattctgtctagcctggtctgcacacatttcttcccaatttaaattccgtgttaggtatgcgctagcagacaaacaaatctgagccaaatgctttacatcaaagggtataaggcgcatagcaccaaaaagagattctggtaatcctaaagtaaatgggctctgtactccattattaactacactagcttttaattccttcaacaacttaaactctagtgggggtgtgttcatgaataaactgctgtggattatttgaatcgggccttatggaaataggaaaaacgcaaggtcctaagggctctccagctatggcagcagagcataaagttgtttgttttggggtctctatttctgctaccgaaggaggcagtacagatgtttctgctattggagggggcggtataggccaatttttatcctccttctcctgtttattattttcagttggtactgtgggtgggacaaaagattctttcagatttttagactcagaatatgattccagctgtctagcagaataagaaggagataacggcagaaggacagtatggactaaactccaagtggagaaaacagaaggatcaacttttagacctttttgatgagcccattttaatccttcacctgctgtgtcccaattttccacatcgaaagtgcctgtctgcagaaaccatgggttatgcataataacctcctgcagcatcttagtgtctgagaactaacctgagcaccagactgtttaagtaaaactttaagcaactgcacataatgttgctcctcaatcccagcactttgggaggccgaggcgggtggatcatgaggtcaggagatcaagaccatcctgcctaacatggtgaaaccccgtctttactaaaaatacaaaaaaaaattgtctcttgctcctcaatagacaaatactgccccatgttaccctgattcagaaacttcctgttcccagtacttctttagagcacctaccttatattgctcccagtacctctttagggcactgatcagtatctctttagggcactgactttatatcagctgccggcagatatcctggggtccccatttgtgtggtgaatttcatttcctctgctccagcaagctttcttcgttcacatcctcaagtccctgttcacggccgccgctttgccatgaaccctactatactgaacaaaggaggacgaacgcgggaataaagacaaagacaaaagaatatgtttggaagaaggggtcgggggcaccttgcttctagtgaacaagggccctgagcttctagtgcccttcgtatttattgattaaaggagatagaagggggtggttgtaggtcagctgcttgatttagagcaggcctgcatgactgcattctttgaacaataggctccagatgtcccagtagataacctcaagcagcacagcgccagggtgattgtcctcagtgtaccttctggcggcaggtgcagacacgagtttgcccacattctgcattgatgataaacagtttactgtatgatcatataacctccagtggaatgctgagttggtcacgaccctcaagtctttggctcccaacccttaggtaggaccttaggacactacacacggttcggcctcattgcttcttatttaaatttgttcatactctccagggtgactggtttgtccctgcattctccaaatatacgggatgcagggcctcaaatcctccaccctcataccacagcctaactcttcaagggcttgcagtgaaatctgtgtctgaacatttcacatgagaggaaagcagagaataaccactagacatttgcctgaaaaatcctttctgcctctcctcctcttatctttccgagacacagacaccttatcaggatgtctttgggatgcggttcctttctggaaactgtacagggtgatgtgtcttcagtacaccctcctatcttttcctggttttgggttttagaactgcctcgggctgactcaagttccccacaactgccatgtctcctggagggtctagtgggtatcagtgcctaggggagtggggcctcccaagggagcagctgaatgccttatggtggcagagatgcctggtatacgcttcatctagataaccaattctctgagttctcagcttctccctcccaactccagtttccattaattggagacacatggctggtcagccaattggatgttgctattgagggaaaacagaaatgattcctgtcttctggattttctcaactgtgaagagagaaatatcccaaaagaagaggaaaggccacttcaacagggtggaacaatagcctgcaaaagcaaaatatacctgggggtacacaggggacacaatgccatgttggtgggaaatcgtcattgagcgcttctcctttcctctatgtgaaatgttcagggaatcaccaccagtcactctcccgtaaaagtatgtgtgctgctcctcctttcatctatcctggaaacagacatcagattgtcttttggttgaggctcccctttggaaacataaaggagtattgtgtctttagtgcactctcctatcttttcttggtcctgggtggcagaaatggggtgacttgcttctttcatgtaaaaatatgcattgaaggtctcgcaataactttgttgcttgacaactcatttagtttttatttttatttatttatctaaaaaatttttttgttttgttagagacagggtcacaaactcccaagctcaggtgatcctcctgcctcagcttcccaaagtgctgggattccacttgtgagccaccatgtccggccactcatttttttgcatcactgagtaacattccattgtacggatgttaccatagtttgtttctttattcatctattgaaaggctcatcttgagcctggtgtgatgcctcatccctgaattcccagctacatgggagactgaggtgagaagattgcttgaggccagcagttagagaccagcctggtagatacagtgtgagaactcctctatttttttttttttaagactcaccttgtttgattctaattttggcagttatgagtaaggctgctaaaaatgtttgtgggaggacttttgtgtggacatcagttttcagttcacttgggtcaatatgtaggaatgagactactgaatccataagaccgtgcttattttcttcagaactccacagactgtctttcaaattggctgtagaattttccattcacatccctagtgaatgagagttcactgtcaccagcatttggaagtatcagtgttttggatttcatctaccgcaacaggtatttactgttacctcattgttgttttctgttgtttttttttttcttcttttggagacggagttttgctctttttgcccaggctggaatgcaatggcgtgatctcagctcactgcagcttctgcctccccagttccagtgattcttctgcctcagcctcccaagtagctgggattacaggcatgtaccgccatgcccagccaatttttgtattattagtagagatgagattttaccttgttggtcacgctggtctcaaactcctgacctcaggtgatccacctgcctcggcctcccaaactgttggattatagacatgagccatcgtgcccagcctgttttcatttgctctttaataacatgtaatgtagagcatcctgtcatatgtttgtttgccataattatgttctttagagagaggtatgcttggaaagattttgctttttttttttttttttttttgagttgtagtctggctctctggcccaggctggagtgccgtggcacagtctcggctcagctcactgcaacctctgcctcccaggatcaagtgattctcctgcctcagcctcccgagtagctgggattacaggctcatgccaccacgcccagctaatttttgtatttttagtagaggcggggtttcaccatgttagccaggttggtctcaacctcctgacctcagtgatctaccctcctcagcctcccaaagtgctgggattacaagcatgagccaccatgcccggcctttttattttttgattagttggcttttttcttatagaattctaggagttcttcatatcttttgggtaccagtccttgatcagataggtgtcctgcaaatattgtgtcccagtctgccacctgtctttttattctcttaacagactcttttcccaaacagagttttattttgaatgaagtccaatttatcgattttctcactcacagatcatgttttttgtgttgtgtgtgaaacctgattgccaaatccaaggttgtcttggttttcacaagtgttaagttctagaagttgtgagttttgcattttccatttaagtaaatgattcatcaggaggtagttttgtaaaaggttcagttctgtgtctaattcatttctttgcatttgctaatccaggtgtttcagtaccatttgttttgtgccaccatgtctaattatttattttattatggatacagggtctcactatgttgcccaggctggtctcgaactgcggggctcaaatgatctgtccgccttgacctccggttttgcatttttaatacttgtctttatagtagatttttctatgttcctagtgcctctcttgcgatcatatggaatcttctcttgtatatttagtttattaagtgtttttaatcatgaggagatatcaacccatttatgctagaggttgcaattttttgaattgcagacgtgtgaaaaatcagactttggtaatgaccttgagcagtaggatacaaataactcccacatgcttagcgttccagaaatggaacagtgggctcaaatgggttaaggcttgtcacatgccttttctgcctctattaggacattcttctcattttttgtttgatttgagatggagtctcactctgtcgcccaggctagagtgcaatggtgggattttggctcactgcaacctctgcctcccgggttcaaaggattctcccacctcagccttccaagtaacagagaatacaggcactcgctgcacgcctggctaatttttgtgtttttagtagagatggagttccaccatgttagccaggctggtctcacactgctgacctcaagtgaaccacctaccttggcctcctaaagtgctgggattgcaggcataagccaacacgcctggctgctaccgtgatttgttatcaatacttactataaaacaaaacttaaaaattatcagcttaaggaattttacatgtacaattgagataggttgacaaatctatgtaagttctctaagatgaattctgttgtattttgccttttgcaattatcctgatgtttcatatatgtcgtagtatgggccaagatattgttttctttctttcttttttttttttgagatgcagtttcactcttgttgcccaggctggagtgcaatggcacaatattgactgaccccaacctcaagcaattttcctgcctcagcctcctgagtagctgggattacaggcatgcgccaccatgcccggctaattttgtatttttagtagagacaaggtttctctatgttggtcacactggtcttgaactcccaacctcaggtgatctgcccgcctccacctcccaaagtgctgggattacaggcatgagccaccgcaccaggccaagatgttattttctaagactaaataatattccattgtatgtatatgcttaccacattttgtttatccattcagccatcaatggatatgtgggtggctgcattgctcattactgccaccccaggaaggtcgtatagtggttaaatctgtgctcattacacctgggtatctcttaggagtttcttgtttgccctcttgtgtaattacggtcttgtttttttcagtaatgtcctgtttgcccttcttatcagcatctatctagctacattctgacaggataactgcaaactgaatgattcctgggcatcataatggatgtttctttctacttaggtgtctcccctcctctctgcttatatctagcatgcctgttttgggtggtccctggggttgtgggatttcccaggggctacccttcctgctcttggctagatatctgccttctctaacaatgtcatcaaagattacactttgggaacaggcattttcaaggatacacagcttcaggactgctaatgttaacttttttctgcatattaattcatagtactctgttatgacaggtgctacagacccacagtccaaggagacattagggacagcccaagcagctgacagagcgatacactatcacaaaaaaaaaaaaaaaaaaaaaaaaaaaattgctgtctgggtgtggtggctcatgcctgtaatcctagcactttgtgactctgaggcaggtggatcacctgaggttgggagttcgagaccagcctgaccaacatggagaaaccctgtctctactaaaaatacaaaattagccgggtatgctggtgcatgcctgtaatcccagctactcgggaggctgaggcagaagaagcacttgaaccccggcagtgagccgagattgcaccattgtactccagcctgggcaataagagtgaaattctgtctcaaaaaaataaaaaaaaaaattgctttatggaagaaagtaagtatagacagagagaaagggatctgatgaccaaagcagggaataaatgtttggagtccacggcatcctgagaacttcttgggaatagagtctaggcccccaatgctgtcactctcacccatcctcctctacacatgtgagatgtttcaggacccagtggcttttaaggatgtggctgtgaacttcacccaggaggagtgggctttgctggatatttcccagaagaatctctacagggaagtgatgctggaaactttctggaacctgacctctataggtaaggatgacaatattccttccctcagtgcattagtttaccaatgtttctagctcaccaatgctgttgagtgatttggaacacagacaggaaatactttgatgaataaatgaggcatggctgctgtaaatcatgggcataggtctaataattttttcacaattttatactgcctcaggattatttttctgtgtttgtattttaggaaaaaagtggaaagaccagaacattgaatatgagtaccaaaaccccaggagaaacttcaggtaatttgcacttataagagaaagcagtgtctctctacacgatcttagaatatgagactatgttaaaaataagtaaaacaaagaactaagtccaggatcaagttcatttattcatacaatattttatctaaaaatatatatttaaatgtgatcaaggctgagggctcactcctgtaatcccagtcctttgagacatggagataggaggatagcttgaggccagcagttcaacaacagcctgcgcaacataacaagaccacatatcaacaacagcaaaaaattagctgggcattgtggtatgcatccgtagtcccagctactcaggaggctgagacatgagggacatgaggatcacttgagcccccaggagttaaaggctgtggtaagctatgatgataccactgcactccagggtgggcaacaggacaagaccctgaaacaaaagaaaaatgacacagagtatttagtattttaaaatagtttacatgggaagagtattaagaagccccatataaacatttttttaaataataggtatggctaggtcaccttgtagaatgtgttgtccagtcaccttcaaacaattcagacagggcagaaagcctacactttgatggagagtgttaaaaatgcaagtacaatacttgctgattaatataaaattacttataaacaaactcttcataatttgtttctcatttttgacaggagtgtcacagaagagaaagtcaatgaaattaaagaagacagtcattgtggagaaacttttaccccagttccagatgacaggctgaacttccagaagaagaaagcttctcctgaagtaaaatcatgtgacagctttgtgtgtgaagttggcctaggtaactcatcttctaatatgaacatcagaggtgacactggacacaaggcatgtgaatgtcaggaatatggaccaaagccatggaagagtcaacaacctaaaaaagccttcagatatcacccctccttgagaacacaagaaagggatcacactggaaagaaaccctatgcttgtaaagaatgtggaaaaaacattatttaccattcaagcattcaaagacacatggtagtgcacagtggggatggaccttataaatgtaagttttgtgggaaagcattccattgtctcagtttatatcttatccatgaaagaactcacactggagagaaaccgtatgaatgtaaacaatgtggtaaatcttttagttattctgctacccatcgaatacatgaaagaactcacattggagaaaagccttatgaatgtcaggaatgtgggaaagcattccatagtcccagatcctgtcacagacatgaaaggagtcacatgggagagaaggcttatcaatgtaaggaatgtggaaaagcattcatgtgtccccgttatgttcgtagacatgaaaggacccactctaggaaaaaactttatgaatgtaagcagtgtgggaaagcattatcctctcttacaagttttcaaacacacataagaatgcactctggagaaagaccttatgaatgtaagacatgtgggaaaggcttttattctgccaagtcatttcaaagacatgaaaaaactcacagtggagagaaaccgtataaatgcaagcaatgtggtaaagccttcactcgttccggttcctttcgatatcatgaaaggactcacactggagagaaaccctatgagtgtaagcaatgtgggaaagccttcagatctgccccaaatcttcaattgcatggtaggactcacactggagagaaaccgtatcaatgtaaggaatgtgggaaagctttcagatctgcctcacaacttcgaatccatcgtaggattcacactggagagaaaccctatgaatgtaagaaatgtgggaaagccttcagatatgtccagaactttcgatttcatgaaaggacacaaacacataagaatgcactctggagaaagaccttataaatataagatatatgggaaacacttttattctgccaagttatttcaaacacatgaaaaaattcacactggagagaaaccctataaatgcaagcaatgtggtaaagccttaattgttccagttcctttcgatatctaaaaggactcacagtggagaaaaactctatgagtgtaagcaatgtgggaaagtcttcagatctgtcaagaacctttcaatttatgaaaggacacacactggagagaaaccctatgaatgtaagaaatgtggaaaagcgttccataatttctcttcttttcaaatacatgaaagttgcacagaggagaggcgccctaagaatgtaagcattgtgggaaagcattcatatctgccaagatcgtttgaatacatgcaaaacacacactggagagaaacctatgaatgtaaggaatgcaaacaagcattcaattatttttcttccttgcatatacatgaaaggactcatacgagagagaatccgtatgaatgtaaggattgtgggaaagcattcagcttgcttaattgctttcatagacatgtaaagacacaccagaaggaaaccctatgaatgtaagcaatgtggcaaaagctttcacttcttccagttcttttcaatatcatgaaaggactcacactggggagaaaccgtatcaatgtaagcaatgtgggaaagccgtcagatcagcctcaagacttcaaatgcatggaagcactcacacttggcagaaactctatgaatgtaagcagtatgggaaagccttcagatcggctaggattctttgaatacaaataatgaatgtaaacaattaactgtttataataactgtatactaacaaatgttattctttttaaataattaagaagctataataaaatatccattggtgtcatgtattagatcaagcttataatgttacattgttattatttggatattgtgaatcagcattacctggattaaatgccaggcatatttttcctcatgtaaactttacttttcatgcttatgtactttaatttttatttcaactgtaatttttctttttttttccttttgctttttctttttcttttttttttttttttttttttagaaagagcctcactctgttgcccaggctggagtgcagtggtgtgatcttggctcactgcaatctctgcttcccaggtttgaacaattctccttcttcagccttttgagtagctgggactacaggcatgcaccacttcacccagctaattatgtgtattatttagtagagacggggtttcaccatattggccaggctggtctcgaactctggaccttgtgatcctcctgcctcggcctctcaaagtgctggatttacagacatgagccactgcgcccagcctcaaccctaatttttctttcactcataataccaaaagttatctcatgtatctctgagtaccttcttgcccaaaaccagcagcgccatacctgctgtcagcaagggtgtaatataccatagtgataaatatgaccagaagacataaatgactgtgggatgtatgagaattacaagtcacattggtaagaagataaaaattttcgtcatgtttatgatttgaaatatgtttacttctatcagttttagaaatacagttacaaaatgcccttgtttttgtcctggtccatcatgatcactgaggagcatcatctcatatgcctgatatgtaacatgtgtctctccaacagtaaaagacttggccttggctgggtgtggtggctcacacctgaaaacccagcacattgggaggctgaggcaggcagatcacctgaggtcaggagttcgagaacaccctgaccaatatgatgaaaccctgtctcatctaaaaatacaaaacttagtcagccatggtggcatgcttctgtaatcctagctagtcaggaggctgagaaaggagaatcacttgaatctggcaggcagaggttgcagtgagccgagatcccatcattgcactccagcctagtcaacaagagcgaaactctttctgaaaaaacaaaaacaaaaacaaaaacaacttggccttgtggtgaggggaggtcagctatagacttctggacctgtttttgccttacttattctgtaaagactaaaacattttctaaaatgtatgggcactgttaactagaaggtaccttagttaaaatatataaattcatttacgctttataaagctatatttttttcaaattgctttactgagtcataggaggctaataaatttgtgtaaattgtctaaataaaagcctttcttcctctgataatgtgctgttgatgctaacttgtcaacagcctgcttatctcagcagtgtaaagttaacggtaacatggaaaagtcacttttatatataatgcaatggctagaacaattctgtcacttcctgtaaggtccagtgaagctgctcttcagaaacagttatttaaaatccttatagtctaaatctaggcaccacaggatgcagaatcaatcactgaccaagccctgtctgtgtgtggaggtgacacacccagtcccagataatgtatccacatcagtgaagggaggagtcattgattgtcggatcacacaaagtaactcagaacagggaagacagggcagtgaaacctggccaggcatggtggctcacacctgtaatcccagcactttgggaggccgaggcaggtggatcacttgaggtcagcagttcaagaccagcctggccaacatggtgaaaccctgtctcgtctaaaaatacaaaaaaatagctgggcatcatggtgtgtgcctgtaatcccagctactcaggaggctgaggcaggagaatcgcttgagcttgggaggtggaggttacagtaaactgagatcacaccattgctctctccaggctagtcgacagagcgagactccatcacacacacacaaaaaaagttgggtgcacctgaatccaacccctgcctcatccttctgaattgaaggccaaatgcaccctgatacttttcaccaaagagtagaaacaacaccattcacttgaccccaaatgtgactttccacaggatgcaagcacagtgttggaatagccaatgacagtgacaatagaagtgcagggtgagggtgatgaacaggacacactggagagcctgacattaggctagatattggggtgtcttgatgcttcacaaagagcccaaggagcaccccaaagaggacactggagcacaggcccaaaggatcttcgtatgccaggaaggccactaattttggaagtcagtgatgttggtgggtttagctttgggaaaagaaatagggaaaatcttttcttacagcttgagaaaaatgaataaacttccacaacaaagtatagtagataaattggtgaattacaaagatttagcaaaatatcagtcctcctttgcaagttggagaacttgtaacagtggataactcttctcttcctattatttgtgaggtaacacctggctggcaactgttgtcatatgtttgtgttcacatgtgattaatatgtagtatgggctttgttatcatggaaatcataatgaaataatattgtccaccttaataagataacaagattcagagaagatgattaaatattgagtatttctgagcacaaagtttgaggatagccactggggaaacagatatcctgaagagtggggtcagtgctccaacacggggaagttgagtcttcacttctgtagggcaaaatgtagacgcttaacagggtgacattttccatacaaggccagtgcacacatttcagtgatttggttggttgcagctaccaaatttcaatgatgattgccttaactttttgtaaggaggggtagtggtctcaaaaggatcctacctctgtcacttcccactcttttctaatcatttacagcccaagaacaacaaagataattaatctttttgatattcacaggaaaggagctattacatggtagtgtaaacacatttctcaatatgtttattgactgaaagggttagatacttttactttccctcatgagggatgaaaggtaagtaccttataatttccttctagcctataaacataaaccgagtttgagagattttgctggattcttcaaacgctgggtattttctcattgaaacagaggccagagtccagtgactgcaagctaaggacaatgagaagcctacaaagagaggttattgaaagctcacgtcaggcggtgactcacacctgtaatcccagcactttgggaagctgagtcgggcagatcatctgaggtcgggagttcgagaccaacctggccaacacagcaaaacccatctctactaaaaacaccaaaattagccaggtatagtggctcatgcctgcagttcccagccattcaggaggctgaggcacgataatcgcttaaactctggaggcagaggttacagtgcaccaagatcgtgccactgcacttcagcctaggtgacagagcgagactctgtctccaaaaaaaagaaaaaaaaaaaaagctctcacttggttcttcccatggtgcccccactgcaggtgtaccagctactcacgttgaccatgggaggagccctttataataaaagaatctcagaatcctggaaagctggggatccacaggcagatgcagtagtcagtgatgccgtgcgcaagtgataatttttgtcatggggctttttctagacacttctagtgaaacaaatgtgggtttaggtaagaaataacttttaattctagaccttgaagtcagcttgtcattaaaagaggtcatttaaaaaaaaaaagtctaggtactggacttgtaagtaaaaataaaaagattaaatacctaaaatggggttgtatataggcttagaaggagtcagtcaaaaattcaggggctgctgggcgtggtggctcatacctgtaattccagcactttgggcagatcacttgaggccaggagttcaagaccacccttgaaacatgggtgaaacacccagcatagtgaaacaccatctctataaaaaaatacaaaaattagctgggcatgatggcacacacctgcaaccccagctactccggagaatgaggcatgagaatcacttgaaccagggaggcagaggttgcagtgagccaagatcatgctactgcactccagcctgggctacagaacaagactctgtctcaaaaaaagaaaaaaaaaaaaaaaaaaaaaaaaagttcagggacctggaggaaggagagaaactgaagcatgctttgattaatagatatttcattttgactgatcactaaagacaaagctattcacctaatggtttgtgaggtgaatactggaatttctagtctgtgtctggtttgtcataggtaacaaacgtggcatcatctaagtcataaggggaagggtgttttgttgtagtaaggtgctcttgcacaacacaaaggatgggggatttcttgaatcacacctcttttcaggatgacccacccacccccatctccttttcacaccccttactctctttgatttggctgctcctgagttgtatccttcataataagttggtaaatgtaagtgaactgtgggtagttctatcaaattatggaacttgaggaggctgttgtacaggacccaggtctagatgcagttgctgagaagtacaggtggcccctggggctttgagtggcatctgctgagtggggctgtgttgggtgagccaggaactcatggagtctctgctaactctgggtggcttctgaattgagtggttgcatgactgcttagtgctggagaattcgctggtgttcagcaagcaccacacatttggtgtcagaaaaaaagacagcataggtcagaaccttccactgactcacagtgagcgagtggtctttggtgggcattgagaccccggtggaaggactgtgtccacactgtggggaggggccagcagggtgtgtgtggaagtcccagaagtaattttctggctgctcacatttccctcacacactacctaagagtgggccagcctggcctgtgtctccacagtcccagtggttcctaagcttgggaatgtgtaactattggagtgtgggtttccttgtgagctgtgggtgaggcaggctgcctacctgagctgcctcccttttgtttcttttacaaaatcttgctgccatggaattgctctttccccacgcctctgagaatttattttattttatttacttatttactttatttatttatttatttttcacacaaaatctcactctgtcgctaaggctggagtgcagtggcgcaatctcggctcactgcaacctgtgccctccaggttcaagcgattctcctggctcagccttccaaatagctgggactacaggcatatgccaccacaccctgctcttttgtgtgtgtgtgtgtgtgtgtatttttaaagttatggcaagttttcaccgtgttgaccaggctggtctcaaagtactgacctcaagttatccacccacctcaacatccaaagttctgggaataaaggcatgagccactgcacctggccacatctaagaattttattctatgatttgcatgttaggattttaattagctggttggaaacttagtgaatattttgataatctttgaagaaggaaatcgagttcttgaaataagctgttttgtgccaagtcaaaataataacaatatgaatactcagagacatatcaccccaaaatggataggccttgggcagttctggtgtgtctccttggtctcacttatttttcgtatgcaaaggtgatcaaagttttgattccttttgttattttttgtagctttgtcatctctttgtcacaaagcagaattttgccacctttgaattttcagtaacataatactaccattaatacaccattagtattatgctgagagggtgtatttctgggtttttccctgagcctgttgcaaacatgctgctgtgtgaagttgtgggtcatgtaattgacttgcctatttccctgcttaatgggacttgagttggttcaagtctatctttgttcttattgacaattctcttcttgtttttgttcctaattggaaatacaacacaaattcttacatgttgggaaaaaattgctgggttgtagattatgaataaatacaaaattactaggaaatgtcgacagagtatgaatgtaacttatggattaaccatctcacctttcatagatgtgtctttattcttgtgatttgccaacactttgaattatctaacgtactttttattgcccatttactctgaaacacaatctctgtgtgattacgtattgctttttactggttgccattggtttagcatttttcctatatgatctttcatctcctgtttagctgtttccagtcatcctcttacatttgactaattggtagttatttttctttctttttttctttttttgttaatttgacacagccttgctctgtagcccagctggagtgcagtggtcactcactgctccctgcagcatcaagctcctgggcttgagcaatcctcccacctcagctttctgcccagctaattaaaaaaatttttttgtagagacaggggtctcactgttttgcccaggctgctcttgaactcctgggctcaatcagtcctctgccttggcctcacaaagtgctgggattgcagacatgagccactatgctcagcaatagggttttttcttttttttaaaccatgtttctgaccaatattttattaaaatctttaagaactgcatgctaacaaaggttattctgttctgtttttcattttctgttttacattttcattatgattacttgtttttcttttttattctcattttttcctagataattacaatacttttccatgtagtggccctggcatgcattttcatccttcatgcaatcatacagctacctcgatgtcccttctctctgccattctgaaattggacctcactcctttgtgactcttgctccccatctgctatgtgataaagtcctgtctgattacatcgtctccaaagcctctttttggacttctgtttaccccttggcatgccctgcatttactctcttcaaaatatatacttagaggccgggtgcggtggctcacgcctgtaatctcagtacttttggatgctgaggcaggaggatcccttgtgcccaggagtttaaaaccagcctgggtcacatagggagaccctgtctcaaaaacaaaatttatagttacaagtcctaaaccccaacagggtcatatttggacacggaccttttaggagatcacatacatttataaaggagggctctcacaatgggattagtaagagagagagagaactctgcctctccagcatgtaaggacaaagcaagaaggcatctagctgcaagccaggaagatagccttcactaggaacaaaattgttggcagcaagatttcagacttcccaagcttcagaactgtgaaaaacaaatttctgctgtttaagaaactgagtccatggtactttgttatactagcctgagctaagtcaccccaagagtcctcacattaaccatatactgtcgtacaagtgctgcatttggatctacctgtaatgtctccaaatctacttttccttttggacccattgtgagaacaggtttgcctcatagacaactgctggtgatattagtgatagcctaccaactagggactaaaaagaaagtttttcttttttttttttcttgcttttttttttgagatggagtttttgctctgttacccaggctggagtgcaattatgcaatctcggctcactgccagttctgactcccaggttcaagtgattctcctgcctcagcctcccaagtagctgggtttacaggtgcgtgccaccacatccagataatttttgtactgttagttagagatggggtttcaacatgttggccaggtggttctcgaactcttgacctcaggtgatccacctgccttggcctcccaaagcactaggattacatgcataaaccaccacactcggcctctcattcatatgtgtgtgtatattctgtttttaataaaaatagagactaggcctatgttgccccgtgtggtcatagcccaaacttttgggctcaagcgatttactcacctcagccacccaaaatgctgggattaaggcatgagaaactgtgccagggcaaatgaaagaaacttagtgggaggccaggcacggtggctcacacctgtaatcccagcactttgtggggctgaggcgggtggatcacctgagctcaggagttcaagaccagcctggacaacatggtgaaaccacatctctactaaaaatacaaaaaaattagctgggcatggtactcccattctcacagtcatgcaaaggctctttcttaaggattccacctgctggaaagcattatatactgcctgcactgactcaagagtgtctggtttcatctccatgtcataattacaaccacaatcctaaagggactgatttaccacactgtggttgccgtaagtcccaaattgtaccctcagcagcaactatatcatcccaagtcacagctctaccctctaaaggtgtgcctgaggcttgtgcctgccatactaacacattaacctgtccaaagcttccttcagagctgtgtcccagtcccaaagtgcccctttctaaaacattgggctaagtgtcagataaatgctctccaataatccaaagaccaacaaatgtctggattttttttcttaagagaaatagtatggctctgtttcccaggctggagtgcagtggtgggatcatagctcactgtagaaactcgggctcaagggatcctcctgcctcagcctcacaagtagctgggagtaaaggcacatgccactatgcccggctgtttttaaattttttgtacagatggagtctcactctattgcccaggctgttcttgaactccaaggctcaagtgatcctcccacctcagcctcccaaagtgctgagattacagttatgaaccaatgcacccagaactcaaaaaggaatatttataagggaaaatatctaatgttcaaattgttatgtatagagcagttaacgggaactatcatttagggtctatgggattctaggacactaggtatgaaacaaatatgaggaaggtcagagaacaagctgacttgatgattaatgctgaaggtgccgcaagcttggtttaagttttcctcctcccatcctccctgatgaatttgataaagtttaaagggatggtttcaccgggggctttttccactgactgcaaggaggtgatcccgcttggtaaatcttcagtaggccaagcctcttacgtggctagaatgatccagtccataaggaaatgtcaccacctgctgtattttacactttgaccatcaaaggggtacagggtttccccagggagtttggtgggattttaattttttgtttgtttgttttgagacagtgtcttgctgaagcgcagtacccaattatagctcacagcagcctcaaactttggggttcaagtgactctcctgtctcagcctcctgagtagctgagactgtaggtacacacacttctccttggtaattaaaaattttttatggagatgggagggtctcacttcacggctcagggtggtctccaatctcgggcttcaagcgatcctcccactttggcctcccaaaatgttgggattacaggcgtgagccatggcacccggcctcccaggctgttgtttgaaggtctttgcaatctctaagagttctgcagcaatttattccctgacagtgagagtctcatcctttgaccccattttgccgcagtagctgaacgttcacttttctttccataagggggcgagcttgccagtgaccctaatccctctcctcatcgatgacttctttgtcatcagagccttcctcttcataaattcccacggaatccaagttttcacgtcccaatcgggcttagttatgatagccacaggcccacaccagctgccacagcacccctgtcccatggaaaccgcctgactctcttctccccaagcgtcctgtcccaggagcccccatcatctctgctcccccgggctccaggccctagagccgcgctgctgcagagcccggttcccagggctgctccctccatatatccacattcatctccagctctccaccctctctccaaccagccaggcccggaggtactgcagtgtcactgaacgtgcgtccctcagctgccacctccaccacgatctggaaatcttttaaatgcacttaagttatcttagaattttccttccccactttatacataaacataggaggagagcagggactctgctggtgtcttattcacacaatgggattgagggtgtttgtgtcatggaactgatcaatggggtgagaagtagctgaataacctgcagggggcagcagagcccgaggccggtgactcaacgctgaggccagtgtggagcctgcaaaggaagggaaaggagcctttcctgggggcttccgggcagcccgccctcccctacaggtggcctccaattgctcagagcagctccagaaggagtgcggattccgagaagctgaagagccctggaaagcagaagacccacatgcacacgtatgtgtgggggttctgtcctttctggtgttgtacctctggagcctggggctgtcttctgggcagggtttggggtttgacatgcatggggccactggggtcagatttgtaagatacagtgaatttctttaagtttttctttaaagatttagcctgctaacttcctcgtcttttgttctcaaactcaactttcctgttcctccttgcccctagttactttaaaacagcctaccccgttcccatcagctctaatcaataactcacatctgttcccttggttacctgtacccattgttcccccaaaactgcacatctcacatgctccacctctgtacctcacatccccctccccttctatatttagaaaaatatgtacaagcagccaatcgggtcagctcagactgtgcggtccgaccccagcccatgggggagtaacacagagatagggaccgcattaaggataaaaacctcctggtctcctttgttctctgtgctcttgtgatcttgattgacgtgagtggcacccttctgcagtagtaaattgccttgctgagagaattaaaattttgcctgagtgctggttttacttcacggcaccaagcttttattccgggagcattttatatccaacaattctaggggatcgtccgagatccccatgctccttttggaagagttcttcagtcaccctaccctggggagacgcgtcccactgccccattgcggtggcctcagggacaggagatcgagacccacccattttgacgaataaacccggactctcagcaacgcggggaagagaggcttgcaataccgcagcgaccaggtaaactctgtgcacagaccaaggtgggaaacgttgcaggggcaacaaagtaattctttggtagtcggaggggtgtgtcagggcattctgggggttgaaagtgcatgaatggtaacaagcactactgctgtgcggagcgagtgagtccaatctgcggttctgtggtcacctcacacggcttagggcagccctgcgggggtcctgtcacaggtttatacggacctgccatcaatgctaagaggaacctgaaacaaacctgcgagggaagcggccagagtggatgaagcgaaagaagggtgcaaggaacctccagcaggtggagctaaaggatagtggaattgagccttagccacacttccagtgagggataggcaaaagacctcctaatatgaggggttgagccacaaggaaccccccaaataggcaagagatccttaatttgagaggctgagccacaaggaacccccaaaataggcaagagatccttaatatgaggggttgagccacagcaagcccccctaggcaagagattcctatcacgagggattgagcctagccaggacccagtataggaaatattacaagcaaaaaagacaaagttagcaacaaagatatcccccctaatagtcccctaggtctcatgttaaaacattagaaagataatgaaaagactaaacataagaaaaagcaattagtgataaaatattgctgttccatttagactcaagaacgaatccttgaacccttagttttctggccagaatttaagtcgaatgagggatggatttgtgaacttctaatagaaaatgttgctagtagaagacctgcctcctgagaagaaacaaattatgccctatgttagttgcaaggagttgtcctttcccctcctccaaggattgaaaggagcaagtcaaaaactaatatttggaggaaaatgagttgtacatgtgccctattaagatagaaccatctttaatgaaaaagacagtgaaggaaggggcttgggggatcctagcaaaaagaacaactcgcaagatcccctagaccattccccacctaatacccaacccttcccctcaggcatcgcccagtaagtctgttcttccccagcctaagtccctctcccctaaagaactccaagctcctaattcaccagatggcttttgccaggctagcaacatgaaggatctgccgcaacatgttgtcagcgttgtctggcccatagtgcacccctgcagcggcaaagcccatgctcctgcccactggctggtccaaggtcctggcactgtattgacggcagctctgcatgacatgcgagccaggccccagcctatgccccatgcaaactacattataggatatctgccttactttgctgaggctaagtaatacggggcttcagcgatggctccaagcagcctggcatccccgcagctaagtttcctgagcaagaagtagataatctttcagcggatatatccactagcatttattatagtcaggccagtgttaaaagtgaaaatatccaccagaaaagaactctgattctttaaagtcacctatgttaaaatgtaccaccaaaaaagaattacatgtgtataaatatgaggctattctgttaaaaatgatagtttaatgttactagtaatttgcttaacctaacaagtttcttaacgaaagatccaaatctaaaaaggaagcacacatgtttagatttaactgattaccatacaaatgtccggccaaacttaagagaaacccccttcaaaaatgattaaaggaaaaaggattcaacagatgttcaataataaatagagaagttcctagagaaataaaatttaaaaattgtttaatagtttacccaaatttgtaagctgtttgcacttagtcaagctttaaagtaactgcaaaggaaccatctatactaatctatattgattctaaatacacctttatcgtggctcatacatttagaaaatttcagacaataataaaggtcaaagccttgttcatgaagagttaataacccaagtgttaaataaccttcagttaccagaaaaaaaaaaaaagctattttccacgtccccaggcaccaaaaatcctatctttcaagagttaagaaaataacctagcaaatcagataatccgaaccagctgccgtttctcctgtaggcactgaagggaattcaaatgttatttaaacctcttatgaaagaagtcctatcccacctaaattagaggacccattaaagacctcaagctatgtatagcacagttaaagtttatatgtgtatgaaaatgtacatccttagccaaacaagtctagaaacttagttgccataactcaaatgtcttctgtcttcctattaatccaaactacctctcaaagcaatccactgccaacattcctacatacttggtttatcttccactttctcttccctcaaaactcacaattttccagtacaggtgcggctcctggagttcccagtgcgtcaacaccggcctgaggagctggcctagtacttcccaccattgaaactgcagtctggacagcagagaaaggatagacccatcacacccgagtcaagaaagcaccgccacccccaaagtcgtaggccattattccaggggaaaaccccctcaaactaaagctaagaaaaatttaacctcttacatctattctattactctttcttcttttccccttccaatgctgaccaccttgtcattaatgtaactcaatcaaactcaccccaagttatcacgtttaatgctatgtctagtcataccctgtaaagatctccaaagtcaaagacaagtctcagcctcagaaaagtatctctgcccctttaaggtgaaaggccccccctaccaagactcttgttccttaacaaatataagaaaacaagtctgtcatagctagaatgatgtcctatggacaaccaaatgtcaaggctagacctcatcagcaggtggctgtatatccttaaaaccatacattcatttcactaaaaaaagcacctccccaattgccagtataatcaatgtaatcccatacaaatttccacctctactgaccctaaacctactttaagtcacttctatggaacaggagccaacttggccagcacagacctcataagatctttcgaaatgcgttttattaatccttcattctcttcacccccttccttctcttctccttctaagctttcttctaatcagactgccacctgttttctacctaatgatactactaaagtaaatattgtagaagtaaaagatttaagacaaaccctagcaattaaaacaggatatcaagatgtaaatacctggttggaatggattcaatattccgtccgcacattgaacaaaagcaattgttacgcttgtatgcatggcagactagaggcccagactgtttcctttccactaggatagcccttcagccgaccaggcataggctgtatggtagctcttttccaaaattccacagcctggggcaacaaatcatgccaagctctctctctgctatatcccgaagtccaacaacctgcaggccagcccccaaaggccattcagcttccttctcctgacgtcaatttcacctcatgtctctcacgacgaggggagaatctggcgttccttagaagcttaacaagatgcaataagcttaagcccttccaaaaacttacccatcagtctgcccttagtcatcctcaagcagatgtatggtggtattgtagtggacctttactggatactctgccaagtaactggagcggcacttgcgctcttgtccaattggcgatccctttcacactggcatttcatcaaccaaaaaaaaagaaaagccacaacaccaaaaaataagagaagccccttataagtcttttgactctcaagtttacataaaggccattagagtcccatggggagtgcctaacaagttcaaaacctgagaccaaataactgcaagatttaaacccatatttccccgaataactattaataaaaatgtagcttcgataaattacatctattataattagcagcagtttatgaattacaccaaggatcttatcaaaaaacagctgaccagttaaggcctactagccaaatagcttaagaaaacagaatcacttgactgggcgcggtggctcatgcctgtaatcccagcactttgggaggccaaggtgggcggatcacaaggtcaggagatcgagaccatcctggctaacatggtgaaacccccgtctctactaaaaaatacaaaaaaagtatccgggcgtagtggcgggcacctgtagtcccagctactggggaggctgaggcaggagaatggcgtgaacccgggaggcagagcttgcagtgagacaatatggtgccactgcactccagcctgggccacgaagtgagactccatctcaaaaaataaaaaccagaatggctccagacatgttattagccaaaaaaggtggagtttgtgttatgattaaaacccagtgttgtaccttcattccaaacaacactgcccccagtgagagcataacaaaggccttgcaaagacttaccgctttatccaatgaattagctaaaatttctggagtcaatgaccctatttcaagatggctaggaaagtagttcagtcaataaagaatcatagcctcaatacttatttcttttacagtcgtaacaggtgtacttattcttgttaggcgttgtgtcataccatgcatccgtaggctaatacaaaggattgtacgaacagcatttactgaaacctcccttagttctcctccaccttattcaagtaagcttttccttttaaaagatcaaatcaaacagcaaagccaaaacacgttaaaaaagtttaaagagaaaaaatcataagaaaattaaaagggaggaattgtaacatacagtaaatttctctgagtttctttttttttttttttttgagacggagtctcactctgtcacccaggctggagtgcagtggcgtgatctcggctcactgcaagctctgcctcctgggttcatgccattctcctgcctcagcctcccgagtagctgggactacaggcgcccaccaccacgactggctaatttttcgtattttttagtagagacggggtttcaccatgttagccaggatggtctcgatctcctgacctcgtgatctacccgcctcagcctcccaaagtgctgcgattacaggcgtgagccaccgcgcctggcctctctgagtttctcttcaaagacttagcctgctaacttccttgtcttttgttctccagctcaactttcctgttcctccttgcccctagttactgtaaaacagcctacccccttcccgtcagctctaatcaataactcacatctgttcccttggttacctgtacccattgttcccccgaaactgcacgtctcacacgctccatctctgtacctcacgttcccctctccttctatatttagaaaaatacgtacaagtagccagtcgggtcagctcagattgtgtggtcgaaccccagcccatgaaggagtgacacagagatagggaccgcattaaggataaaaaaacccccggtgacctttgttctctgtgctcttgtgatcttgattgacacaagtggcacacttctgcagaagtaaattgccttgctaaacaaatgaaactttcccctaagtgctagttttacttcgtgggaccaagaatttattcctaaagcattttatatccgacagagatattcatatatataaagaaaatgtgggccaggcgcggtggctcacgcctgtaatcccagcactttgggtggccgaggcgggtggatcacttgaggtcaggagttcaagaccagtctggtcaacatggtgaaaccttgtctctactaaaaatacaaaaaattagccaggcgcggtggcatgtgcctgtaatcctagctgctggggaggctgaggcaggagaatcacttgaacccaggaggcggaggttgcagtgagtggagattgcaccactgcactccagcctggggggacagagcgaggctctgtctcaaaaaaaaaagaaaagaaaatgtgtgaagatcaggctagagacagaaatgtttgggagcgtcacctggataaagggttcatgaagttggcagtttatttaggtcaaaagcttaacttaacccctggagagagtttcctgctggtgaaaatgaagatctggaaggaggaagcattttcacactgtgaggaggggatgggggtgtgagagcaagtcttagccatgcctcatccccagttgcggcccgctccaagacatatgcctctcctcctggcgcagtcgtgtctggcctggtctcggttcccctgctgctctgaggcaggagatggctcctgtggacactgaatctgaaattccctgcacactcctgtgaccccatgcagaacgaaggagcagggacagtcccttgagtgaggaagacgctagtgttctcctctatcaatagcaagtttggctgaaatgcaaatatccaataaccagagtgcaggaaggagctcgcccttggaaaagctgtggtcagaatccgtctgtctggctctgcagggcccgatacccagggcttccgctgtcactcagacatggggggcggggcctagcattccatccaatcagaggcattgtggcgggtccctgcccactgttcctccagacactgagggggtcgcattccttacctcacctttgtccctgcgcgggctgcggctgggatccggtctttccagccccgagagggacctggttcctctgcccaggcttctgtcactctgtcacctacgctatgccctgctgtagtcacaggaggtgtagagaggaccccgggacatctgaaagccaggaaatggtgcgtgtctggggccgggtgtcgtgagacgggggaggggctgcctggaccgaccggaaccgactgtggcgagaccctggctttcctgcgggcgactttgggatctgggaccgagtcctcctggagccgctcggccctcggtcccctcgactgctcggtgtggctgggccggtagccgggacaccaggcgtcctgtctcgtctctgcgcggcgactgcggttccagagccctctatgggcagctccgcgcccgcagccacgcgtctacccagattgtgcgggggccacgggagggtcatgtgggtgatcccgactcgggtgtggggttcgtgcttgggaggagcagcggtctgtggggcccccagtgtccactttttctcctgttaaaaattaaactgaggaacgttaacaaagagttcatttgagcaaacagcgattcacgaatgagacacacccagtcctggcttgtggtttgtcaacggaaaaagccaaactatgtaaaataaagaagtttattcggagccgaataggagagaccttggccgagggaaaaacaaccccaagaagcctggagtaagtggtcccgaggcggctcaagacagtttggttttattcattttagagagacaggaattgcagggaaaatcatgaattagtgcctggaaggtgtaatttccttaggcagaaagggagggacctggccgggcacggtggctcacgcttgtaattccagcactttgggaggccaaggcgggcggatcacctgaggtcaggagttcaagaccagcctggccaacatggtgaaaccccgtctctactaaaaatataaaaaagaaactagccgggcgtgatggtggacgcctgtaatcccagctactcgggaggctgagacaagagaattacttgaatccaggagacaggttgcagtgagcccacacagtgccactgcactccagcctcagcacagagtgcgactctgtctcaaaacaaaaacaaaaacaaaaaacagaaagggcgggacctgtggaaggggggttagaaggcacaggtggttgagggattctgtaggtggcagctggttgagagtgtgaagctttgtctaaagtttggaggaggtaggaaggaatgctgaaggaagggggtctgttatctgccacttgattccatcccagccaaaaaacagacctgtttctctagattttatgaattctaaggtgtgacttacccttgtcttgcgtggccttaggtcttgtttgtaatttggtatcttcttgccacaaggagtctgtttttccagtcagataatgtctgtttttacatgaatgtgcgtcagttgctgcatgtaaactcctaaagggagagggtataaggaggcctgtctcacctcccatcctgtcatacagaggcactcaattttcagggttttttgggggttcccttggccaagagccggtcacttcacttacctgggaaggtactttgtttttgtttttatttaaaacagagtctccttctgtcactcaggctggagtgcaatggctcaatctcggctcactgcaacctccaccttccggattcaagcaattctctagcctcagcctcctgagtagctgggattacaggcacgcacctgaagggggcctgcccctccacccctgtgggtgtttcttgtcaggtagagacaagagactgagtaaagaaataagacacagagacgaagtatagggaaagaacagtgggcccaggggaccggcgctcaacatgcgaggacctgcaccggcgctggtctctgagttccctcagtatttattgatcactatttttactatcttggcgaggggagtgtggcaggacaacagggtgatggtggggagaaggtcagcagggaatcatgtgagcaaaggaacctgtatcatgaataagttcaaggaaagatactgtgcctggatgtgcaggtaggccagatttatgtttcactttatgcaaatatctcagtgtagcaaagagtaacagagcagtattgctgccagcatatcttgcctcccacagggcggttttctcctatttcagaatagaatgaatggtcggctttacacagagacattccattccccggaacgagcaggagacagaagccttcctcttatctcaactgcaaagaggcctccctctttcactattcctcctcagcacagaccctttaggggtgtcaggctgggggatggtaaggtctttcctttcccacgaggccggatctcaggctgtctcagtgggggaaaaccttggacaatacccaggctttgttgggcagaggtccctgcggctttccgcagtgcactgtgcccctggttaaccgagaatggagaatggtgatgacttttaccaagcatactgcctacaaacatattgttaacaaggcacatcctgcacagccctaaatccattaaaccttgattcaatacagcacaggtttctgtgagcacagggttggggctaaagttacagattaacagcatctcaaagaagaacaatttttgttagtacataccaaaatggagtttcttatgtcttccttttctatgtagacacagtaacaatctgatctctcttttccccacatgcaccaccacgcctgcctaatttttgtgtttttagtagagatggggtttcaccatgttggccaggctgttctcgaactcctgacctcaagttacctacctgcctcggcctcccaaagtgctgagattccagatgtgagccacctcgccaggccagaagatagatttttatttttagtttataggttgaagcctcagcttttataaggtacatgaggagacaaaccagataaatgcttgattggttgcagagatgcagtcgccttatttggacttgccagcccgaaataattcaaaggttcagatttcagtttgaagagtttattcaagcagaaagatagcaatggcccattcaggaaaaaaaacagactccagagaaatggactcagtactctaaaattagaagttaagttctttcttatattaccaggaaaagaggtcctgatcagaccccaagagagttcttggatctcacacaggaaagaattcaagacgagtcacaaagtgcagtgagaagggagtttgttgaaagctactctgggccagcatgatggcttagatctgttttctaagcacattgggaggccgaggcaggaggatcacttctagtcagcagttcgagaccagcctgggcaacatagggaaaccccatcttttccaaaaataacaaaaattagccgggtgtggtggcttgcacctgtagttccacgtactcgggaggcaagcgttcaagacccagctggccaatgcagtgagagcctgtctgtattaaaaaaaaaaaaaaagaaaagaaagaaaggaagggagggagggaaggaaggaagaaggaaggaaggaagaaaaaggaaggaaggaaggaagagagtgattctctgttacagagtagggcatcctcataaagcaagtggaggaatgtactaagtttttcttaggtagggatcttgtctatgtaaagactaaactaagctgtgcctacctgcatgggggctgacagcatcacaaaatttattactctattgatttaaagaaaactatcctttacattttagcacccaagtgcattaaaacaactataattatcttgaaagcacatattgttatgggtattgggacatcaggacattctgttgttgtgggagtgtaaggatacttgcaggcatcttcaggctgttttcttcatgggaaactttatgatcatgggttgtgactggcaaggagtgtttcttgttagtctcaagatggagctgaacttaaattggtgtttctctggctcccctaggcacctgcttccctaacacttgtatagggaaaaggcaaataaatataataggattgcattttccatagaaggctgatgtatgaggtacaataatttaattttatttttttctttgagcgaatgtcttgttctgtggcccaggctggagcagtggtgcgatcatggcttactgcagccttgacctccctggctcaagcacctcagcctcccaagtagctgagactacagtcgcccaccagcactcctggctgatttttttttttttttttttttttgtatgcaggtggcatcttgatatgttgcctaggctggtctctagctcctggcctcaaacagtcctgcttccttggcctccaaaagtgctgcgatcacagacgttagccagtgcacctggctagcaacttaatttgttatggtttgcttttttcccccagcgcttgttttcttttctttctagctgttttttatttccttttcaatttaaaagagtgaattcaacattccagctgaagacaatgtgatagccatgaagtctttgtgtgagaaagttaagagggaagttagtctactacagagatcagtagtgaagaggggcccagtgggatggctcacacctgtaaccccagcactttgggaggctgaggcaggtggatggcttgatctcaggagttcaagaccagcctgggcaacataagtgagatgccatctcaattgtgaaaaatcatattaaataaataaaaaaaaagtgaagagggaaagggtctttcctgtttcccttcagtcatttacaacattttacaaaacactataggtaagaaagaaggcgaatctgtaatcagggaaaggagagttccagctggctatgtgaaagctgtgtgtcatgtgactcaaccccatgattgcattgcttcaagatagagatccaccagcttaaatatttgaattactttgttgtttttgtttgtttgtttgttttgagacaactctgtggcccaggttggagtgcagtgacatcatctcagttcactgcagcctttgcctcctgggttcaagtaattctcctgcttcagcctcccaagtagctgggattacatgcatgtgccaccgcacatggctaatttttgtatttttagtaaacacggggttttaccacgttagccaggctggtctccaactcctgtcctcaagtggtccgcccaccttggcctcctgaagtggtgggattacaggtataagccagctttcctggcctgacttaggtagaaattttctagttatgtaatcagaggttaattggtggattctgcctgattaagcataaattttgtttccctatagattaataattttgaagagttgtatttaaatttgctttcagggtctttaagtaggaccttcggacactgcatacagttcggtctcattgttttttatttaaaattttccacaatctccagggagactgttttcccctggcattttccaaatatatgggatgccggatctcaaatcctccaccctcataccacagcctgactcttcaagggcttgcagtgaaatctgtgtctgaacatttcacatgagaggaaagcagtgaataaccactagacattttcccgaaaaatcctttctgcctctcctccttttatctttcctagacacagtcaccttatcaggatgtctttgggatgcggttcctttctggaaacattacagggtgatgtgtcttcagtgcaccctcctatcttttcctggttttgggttttagaactgcccggggctgactcaagatgcccacaactgccatgtctcccggagggtctcatgggtattagtgccttaggggagtggggcctcccgagggagcagctgaatgccttgtggtggaggagatgcctggtatactcttcatctacataaccaattcttggggtgctcaacttctctctcccaactccaatttccattaattggagacacatagacagtcagccaattggatgttgctattgaggaaaaagagaaatgattcctgtcctctggattgtctcaaccgtgaagggagaaatatcccaaaagacaaggaacagccactccaacatagtggagcaattgcctgcaaagcaagatatgcatgggggtacacaggggacacaatgcagtgttggtgggaaatagtcattgagcacttctcctttcctctcatgtgaaatgttcagagaatcaccaccagacactcccgtgtgaaaatttgtatgcatctcctcctttcatctatcctaaaaacagagatcttttttttttgagacagagccttgctcagtcgcccaggctggagtgcagtggcacgacctcggctcactgcaagctccgcctcccgggttcatgccattctcctgcctcagcctcctgagtagctgggactacaggagccttttagtagagacaggatttcaccatgttagccaggatgctctctatctcctgacctcgtgatccacccgccttggtctcccaaagtgctgggattacaggcatgagataccccacctggcctaaaaacagagatcttatcagattgtcttttggttgaggctcccctttggaaacttcaaagggtattgtgtcttcagcacactctcctatgttttcttggtcctgggtggtagaatggggtgacctaatattcccacagctgccatgtctcttggagggtctagtgagtatcagcccctgagtcactcctcccaggggacagactgaggtaggagaatggggactcccaagagagcagctgaatgccttacgatggaaggagactcctagtatactctgcatctagatagccaacccctcgagatgctcagcttttctttcccagtcccagttttcgtaagttggagacacatggctggtcagccagttggatggtgctattgagggaaaggagaaatgattcctgtcctctggattgtgtcaactgtgaaggaagacaaaaccccaaaagacaaggaaagcccaccccaacggggtggaccagtagcctgcaaatcagaatatgaaattgaggttcacagcggggcatagtgcggtgttggtggaaagtagtcatgagcgcttcggtgagcaggatgggggtggagagatgtctcatgtgatagggtgacctgtgctgacacatgagtcagacatcactgtgttccagccagtattgcccctctgtgggcttgtcccttgtaaagaatagttcatagattgcagcttgagtatttcaaattaactttacgttgcatttttcactagagccaaatccaagaatgattgcatagatcaggtaagacacagaagaggcaactcaacaaagcccatgacatacagtgcatggctcacaatcccaggagatgagggcagcacagctgcagagcaacacagagtggggagaacatccaggatgcacattcaaccagcaggtggggagcaagacagacagggacctgtgggccaaagcgtttctcagggtccagggaattgaacaaggagacgtcgctcagggagttgtttctggtggatttagagcaagcaggcactagttctgtgaagtcatactgtgattaagaggtggtctgtaccatccatgtggggtgtaagggtcagtggtacaagtcaaattggttatatctagctgtcccacagggaggtggtcaccagaatgcagtcgtgtaagaaatatatgtgagttgaccacatggaggaaatgggaggaggtggagaactagaaactgttaagtttgaataaagtttttttccgttatgagaaagttaaatccataaagaaaatgcatgctaaggtaacatataactataagaactcagtataagaggcaactctagaattaattaaattattgtatgtggagatgatgggtagtaaactgattattctcctgtagataaccatttgtcgctgctttttctgttaagtgttcaccacttgtatcattggctggcaatacctggtttgtcatagtttcacattaccttaaacagatgcccagactgggcatggtggctgacgcctgtaatcccagcactttgggaggctgaggcgggcggaacacccgaggtcaggagtttaagatcagcctgaccaatatggtgaaaccctgtcactactaaaagtacaaaattagtcaagcgtgatggtgcatggctgtaatcccagctacttggaaggctgaaacaggagaatcacgagaacctgggagatggaggttgcagtgagccgagatcacaccattgctctccagccttggcaacaagggcgaaactccattaaaaaaaaaaaaaaaaaaaaaaaaaaagattccctggtttcacaatttgctgttttccattggtctatctttccatctctctgataataccattttctcttaattagtataacgttcaaagctgtggtgtttagtgggtatattgcctgtctatcttagtcatcttgggctgctatatcaaattaccatagactgggtgacttaagggataaacatttatttctggcagttcttgaggttgtgaagtccatgttaagggagctggcagatctagtgtctggtaagggcccgcttcctggttttgcagatggtcatcttcttgtgtttcttcatgtgacagaggagaggaagccggctctcctgtgtcttcttataagagcactaatctcattcagaaaggatcgactcttatgctgtcatctaatcctaattacttttcagagatgtcaacttctaatactatattgggggtaggttattaatgtgtgatttttttggagtgatgcaaatattcatgccgtaacaccccccaaccatattctatagagcatcttggctattcttagtcattgtcttgtatttcggtttttagaagtagttttttcttaattttagtgaaaaaaacaaactgccttgtaaatttcatggactaaaatataactgtagtcatatttcagaaacgttacatcatagtgctatttaatctccttttaaggacacatgacattttttcatttatttcattttatattgatgtttttcagtgtagactttttgcataataatcattttatatccttcctgagacttttttggacttgaagaaaattagttttaatagaaattagtggctgggcatggtggctcatgcctgtaatcccaatatttgggaggctgaggtgggtggatcacctgaggtcaggagttcaagaccagcctgatgaacatggaaaaaccttgtctctactaaaaatacaaaattagccaggcctggtggcacatgcctgtaatcccagctacctgggaggctgaggcaggagaatcacttgaacctgggaggccaaggtggcggtgagccaagatcacgccattgcactccagcctgggcaacaagagtgaaactccatctcaaaaaaataaaaataaaaataaaaataaagagattattccagcatcggcaacatggcaaactttgcctatacaaaaaattacctcgtcactgtgatgtgtgcctgtagtcccagctactcaggaggctgaggtagaaggatctgttgagcctaagagttcgaggctgcagtgagctatgattgcaccgctacactccagcctgggcaacagaatgagaccctgtttgaaaaaaaaaaaaaaagagtcaggtgcggtagctcacgtctctaatcccagcactctgggaggccgaggcgggtggatcacaaggtcaggagatcgagaccatcctggctaacatggtgaatccccgcctctactaaaaatataaaaaattagccgagcgtggtggtgggcgcctgtagtcccagctactcgggaggctgaggcaggagaatggcatgaacccgggaggcggaggttgcagtgagccaagatggcgccactgcactccagcctgggtgagagagtgagactccatctcaaaaaaaaaaaaaaagaaaagaaaagaaaaaagaaaaaaattagtttcaatagagtgtgctcttttaaaaattatatttagcagactgttgctgataattataattcactgatagttatttctgtatagagtgtgcattctagaatcttactaaaaatattacatgtgcacaaaatacataaaagaattgcacaattaatccaaataatgatggagccagtattgggaataagataactgccttacatttttttatactttcacaacctgggtatgcatcctcatcagtatgttttatttttgcatgtttttcatgcaaatgataaccaatatgtgatatttcatattggattttattttaactcagttatgaaccttatatggaatgatagttaattcactttcttatttaatgggttttattatttagaacagtggttatttccccaaaacattgagcagataatccacagagttcccgcagttttcttccaggctcatagttcctcctggctttttttttttttttttttttttgagacagaatctcgctctgttgcccaggctggagggcagtggcatgatctcggctcacagcaacctccgtctcccgggttctagcaattcttctgcctcagcctccggagtagctgggaatacaggcacacaccaccacacccaactaatttttgtatttttagtagagagagggtttcaccatattgaccaggctggtctcgaactcctgacctcataattcacccacctcagccttccaaagtgctgggattacaggcgtgagccaccacgcccagcatagtttccactgttttaaacatcttgactggccaggtgctgagcctcatacctgtaatcctaccatttagggaggccaaagcaggaggatagcttggactcaggagttggaggccagcctaggcaacatagcaagaccctgtttcaaagaaaataattgttttaaaccaaaaaaaccatattgactttgtgtagtgtatcctacaacttatgcaagaacatattacatgtgaacatgatgaaaattgaagaagccaatgttattattacctaaagtccatcttttacattaggcttcactctttgtgttctgtggtttaagacaactacatgtgtcatgtatccaccatcacagtcttatacagaagcgtttcactgccctcaaaatcccctgtgctcctcctaattctatctctcccttccctcttttgccacccctatttatccctggcaacaaatggtgatgttcctgcctccgttttgcattttccagaatatcacatatttggaatgatgctgtaagtggccatttcagacttgcttctttcatgtaaaaatatgcattgaaggtctctcgatacctttgttgcttgacaactcacttattttttatttttctttctttatctaaagatttttgttttgtgagagacagggtctcaaactccccagctcaggtgatcctcctgcctgagcttcccaaatgcctggattccacttgtgagccaccatgtccggccactcattttctttcattactgagtaacattccattgtacagatgttaccatagtttgtttctttattcatctactgaaagactcatcttgagcctggtgtgatgcctcatccctgagttcccagcacacgggagactgaggtgagattgcttaaggccagaagttagagaacagcctggtagatacagtgtgagaacttatctatttttttttttaaagactcaccttgtttgattctagtttttggcagttatgagtaaggctgctaaaaacatttgtgggaggacttttgtgtggacatcagttttcagttcatttgagtcaatatgtaggaatgagactactgaatcagtaagaccatgcttattttcttcagagctccacagactgtcttccaaattggctgtagaattttccattcacatccctagtgaaggagagttcactgtctccagcatttggaagtgtcagtgttttggattttagctactccaccaggtatttgctggtgctttatttttgttttcctttttttttccctttggagacggagtttcgttcttgttgcccagactggagtaccatggtgtgattgagctcactgcagcctctgcctcccgggtttaagcgattctcctgactcagactcccaattaactgggattacaggtgtacgccgccatgcatggctgctgttcgtattattagtagagacagggtttcaccatgttgtccaggctggtctcaaacttttgacctcaggtgatccacccgcctcagcttcccaaagggctggattacaggcatgagccactgcacccggcctgttttcatttgctctttaataacatgtaatgtagggcatcctgtcatatgtttgtttgccataattacattctttagggggaggtatacttggaaagattgggctttttttttttttgagactgagtctggctctgtcacccaggctggagggcagtggcgtgatctcggctcactgcaacctctgtctcctgggttccagcgattctcctgcctcagcctcctgagtaactgggattacaggctcacgccaccaggcccagctaatttttgtatttttactagagacggggtttcaccatgttagtcaggctggtctcaaactcctgacttcggtgatccacccgtctctgcctcccaaagtgctgggattaaggcatgagccaccgtaaccggccttttgcttattttttgattggttggtttttttcttacagaattttaggagttctttataccttttgggtacaaatccttgatcagataggtgtcttgcaaatattttgtccctgtctgctgcctctctttttcttcttttaacaaagtcttttccaaaacatttttgttttgaatgaagtccaatttatcgattttctcattcacagatcatgctttttgtgttgtgtgtgaaaccttattgccaaatccaaggtcgtcttggttttctcagtgttacgttctagaaattgtgagttttgcattttccatttaagtaaatgattcattaggaagtagttttgtaaaaggtgcagttctgtgtctaattcatttctttgcatttgctaattcaggtgtttcaataccatttgttttgtgccaccatgcctaattttttactttattatggagacagggtctccttatgttgcccaggctggtcttgaactgaggggctcaaatgatctgtctgccttggcctctgggtttgcatttttagtacatgtctttatagtagatgtttctatgttcctagtgcctctcttgtcatcttatggaatcttctcttttatatttaatttattgagcatttttaatcatcaggagatattaacttatttatgctggaggttgcacttttttgaattgccgacgtgtgaaaaatcagactttggccatgaccttaagcagtaggatataaacaattcccacatgcttagcgttccaaaaagggaacactaggcataaattggttaaggcttgtcagatgccttttctgcctctattaggacattcttatggtgttttgtttgttttaagagtctcactctgttgccccggctggagtgcagtggcgtgatctcggctcactgcaacctctgcctcccaggttcaaatgattctcccatgtcagcctttcaagtaactgtgactataggcatgtgccaccatgcctggctaatttttgtgtttttttagagatggatttccaccatgttggccagagtggtctcaaactgccgacctcaagtgatccgcccaccttaacctcccaaagtgctgggattacaggcatgagccaccatgcctggctgctaccatgatttgttatcattacttatcttaaaacaaaatgtgaaacttatcagcttaagaaattttacatgtacagttgagatagtttgacagatctacataagttctctaagatgaattctattgtattttgcttttttcaattatcctgaggtttcatgcatgttgtagtataggccaagatgttattttcttttttttttttttttttttgaatcggagtttcactcttgttgcccaggctgaagtgcaatggtgcaatcttggctcaccgcaacctcctgcctcccgggttcaagcaattctcctgcctcagcctcctgagtaactaggtttacaggcatgtgccgccatgcccgggtaattttgtatttttagtagagacggcatttctccatgctggtcaggctgatctcaaactctgtccctcaggtgatctgcccgcctcagtcttccaaagtgctgggattacaggcgtcagccaccatgcccggctaagatgtcattttctaagagtaaataatatcccattttatatatatgcttaccacattttgtttttccatttagccatcagtggatatgtgggtggctgcattgctcattactgccacctcaggaaggtggtatagtggttaaatctgtgcttatgacacctgggtatctcttaagagtttcttgtttgccctcttgagtacatacagtgccaggtattttttaggaatgtcccctttgccctgtcagcatctatctagctacattctgacaggataactgcaaaatgaatgattcctgggcatcataatggaagtttctttctacctaggttattcccctcctctctgcttatatctagcatgcctgatttgggtggtccctgggggagtgtgatttcccaggggctccccctcctgctctttgctacctacatgcttcctctgacaatatcatcaaagattacactttgggaacaggcattttcaaggatacacagcctcaggactgctaatgttaactttttctgcatattaattcataggactctgtcatgacagatgctacagtccaaagacccacagtccaaagagacattagggacagcccaggcaactcacttttctccctgggttcggtaaatacatttcctatcctgctgtggctttagcccttgttcagttctagcatcacaattgctttatgaactagccaggtgtggtggcacatgcctgtggtctcaactactcaggaggctgaggcatgagaattgcatgaacccaggagtaagaggttgtagtgagccacgatggtgccactacactccagcctgggtaacagaacgagacgctgtcttaaaaaaaacaactgctggccaggcctggtggctcacgcctgtaatcccagcactttgggaggctgaggcaggcggatcacctgaggtcagcagcctgaccaacatggagaaaccccgtctccactaaaaatacaacattaaccaggcatggtggcacatgcctgtaatcttagctactcaggctgaggaagaagaagtggtagaaccccggcagtgagccgagatcacgccattgcactccagcctgggcaataagagtgaaaatctgtctcaaaaaaaagaattgctttatggaagaaagtaagtatacacagggagaaagagatctgatgacccttggagtccacggcatcctgagaacttcttgagaatagagtctaggcccccagtgctgtcactctcacccatcctcctctacacatgtgagatgtttcaggacccagtggcctttgatgatgttgctgtgaacttcacccaggaggagtgggctttgctggatatttcccagaggaaactctacaaggaagtgatgctggaaactttcaggaacctgacctctgtaggtaaggatgacatattccttccctcagtccattagtgaaccagtgtttctagctcatcaatgctgttgagtgatttagaacatagacaggaaatactttgatgaataaatgaggtatggctgcagtaaatcatgggcatagaatctaataattttttcacaattttatactgcctcaggactatttttctgtgtctatattttaggaaaaagttggaaagaccagaacattgaatatgagtaccaaaaccccaggagaaacttcaggtaatttgtacttacaagacaaagcagtgtctctctagacaatcttagaatatgacaatatattaaaaataagtaaaagaactaagtccaggatcaaatacatttatttttagaatatttgatcaaaaaacatatatataaatgtgacctaggctgtgggctcactcctgtaatcccaatcctttgagaagtggagataggaggatagcttgaggccagcagttcaagaacagcctgggcaacataacgagaccacatatcaacaacagcaaaaaattagctgggcattgtggtctgtagtcccagctactcaggaggctgaggcaggaggatcacttgagccagtaaaggctgcagtaagctatgatgatatcactgcactccagtgtgggcaacaggacgagacccctaaataaaagaaaaatgacacagagtatttagtatttgtaaaatagtttacatgggaagagtattaagaagccccatataaacagttttttaaataatagttatggctgggtcaccttgtacaatgggttgtccagtcaccttcaaacaattcagacagggcagaaagcctacactttgatggacagtgttaaaaatgcaagttcagtacttgttgattaatataaaattacttataaacaaaccctttgtaatgtgcttctcatttttgacaggagtctcatagaaaagaaagtcaatgaaattaaagatgacagtcattgtggagaaacttttacccaggttccagatgacaggctgaacttccaggagaagaaagcttctcctgaaataaaatcatgtgacagctttgtgtgtggagaagttggcctaggtaactcatcttttaatatgaacatcagaggtgacattggacacaaggcctatgagtatcaggaatatggaccgaagccatgtaagtgtcaacaacctaaaaaagccttcagatatcacccctcctttagaacaccacaaagggatcacactggagagaaaccctatgcttgtaaagaatgtggaaaaacttttatttcccattcaagcattcaaagacacgtggtaatgcacagtggggatggaccttataaatgtaaattttgtgggaaagccttccattgtctcagtttatatcttatccatgaaagaattcacactggagagaaaccatatgaatgtaaacaatgtggtaaatcctttagttattctgctacccttcgaatacacgaaagaactcacactggagaaaagccttatgaatgtcagcaatgtgggaaagcatttcatagtcccagatgctatcgtagacatgaaaggattcacacgggagagaaggcttatcaatgtaaggaatgtggaaaagcattcacgtgtccccagtatgttcgtatacatgaaaggacccactctaggaaaaaaccctatgaatgtacgcagtgtgggaaagcattatcctctcttacaagttttcaaacacacataagaatgcactctggagaaagaccttatgaatgtaagatatgtgggaaaggcttttgttctgccaattcatttcaaagacatgaaaaaactcacagtggagagaaaccctataaatgcaagcaatgtggtaaagccttcattcattccagttcccttcgttatcatgaaaggattcacactggagagaaaccctatgagtgtaagcaatgtgggaaggccttcagatcttcctcacaccttcaattgcatggtaggactcacactggagagaagccctatgaatgtcaggaatgtgggaaagccttcagatctatgaagaaccttcaaagtcatgaaaggacacaaacacacgtaagaatacactctggagaaagaccttataaatgtaagctatgtgggaaaggcttttattgtcccaaatcattgcaaagacatgaaaaaactcacactggagagaaactctatgaatgcaagcaatgtggtgaagccttcagtagttccagttcctttcgataccatgaaaggactcacactggagagaaaccctataaatgcaagcaatgtgggaaagccttcagagctgcctcagtccttcgaatgcatggtaggactcaccctgaagataaaccctatgagtgtaagcaatgagggaaagccttcagatctgcctcacacctttgaatgcatggtaggacacacaatcaagagaaaccatgaatgtaaagaatgtgggaaacccttcaggtctgcccagaaccttcgaattcagtaaaggacacaagcacacataagaatgcattctggatagctgaacaaaaggcagcagaaacttctgcagacttaaatgtccctgtctgacagctttgaagagagtagcagtcctcccagcatggagtttgagatctaagaatggacagtctgcctcctcaagtgggtccctgatctccaagtagcctaactgggaggcacttcccagtaggggccaactgacacctcatacggccgtgtgcccctctgtgacgaagcttccagaggaaggatcaggcaacaacatttgccgttctgcaatatttgctgttctgcagcccctgctggtgatacccaggcaaacagggtctggagtggacctcaagcaaaatccaacagacctcagctgagggtcctgactgttagaaggaaaactaacaaacagaaaggacaaccacaccaaaacccatctgtacatcaccatcatcaaagaccaaaagtagataaaaccacaaagatggggagaaaccagagcagaaaagctgaaaattctaaacatcagagcgcctcttctcctccaaaggaacgcagctcctcgccagcaatggaacaaagctggactttgactttgacgagctgagagaagaaggcttcagatgatcggtaataacaaacttctccaagctaaaggaggatgttcgaacccatcacaaagaagctaaaaaccttgaaaaaagattagacaaaatggctaactagaataaacagtgtagagaagaccttaaatgacccgatggagctgaaaaccatggcacgagaactatgtgatgcatgcacaagcttcagtagctgattcaatcaagtggaagaaaaggtatcagtaattgaagatcaaatggatgaaatgaagtgagaagagaagtttagagaaaaaagagtaaaaagaaatgaaaaagcctccaagaaatatgggactatgtgaaaagaccaaatctatgtctgattggtgtacctgaaagtgacagggatggaaccaagttgggaaacactcttcaggatattattcaggagaacttccccaacctagcaaggcagaccaacattcaaattcaggaaatacagagaacgccacaaagatactcctcgagaggagcaactccaagacacataattgtcagattcaccaaagttgaaatgaaggaaaaaatgttaagggcagccagagagaaaggtcgggttacccacaaagggaagcccgtcagactaacagcggatctcttggcagaaactctacaagccagaaaagagtgggggccaatattcaacattcttaaaggaaagaattttcaacccagaatttcatatccagccatactaagcttcataagtgaaggagaaataaaatcctttacagattcaaatgctgagagattttgtcaccaccaggcctgctgtaaaagatctcctgaaggaagcactaaacatggaaaggaacaaccggtaccagccactgcaaaaacatgccaaattgtaaagaccattgaggctaggaagaaactgtatcaactaacgagcaaaataaccagttaacatcataatgactggatcaaattcacacataacaatattaaccttcaatgtaaatgggctaaatgctccaattaaaagacacagactggcaaattggataaagaatcaagacccatcagtgtgctgtattcaggagacccatctcacgtgcagagacatacataggctcaaaataaagggatggaggaagatctaccaagcaaatggaaaacaaacaaaaaaagcaggggttgcaatcctagtctctgataaaacagactttaaaccaacaaagatcaaaagagacaaggccattacataaaggtaaagggatcaattcaacaagaagagctaactatcctaaatatttatgcacccaatacaggagcactgagatgcataaagcaagtccttagagacctacaaagagacttagactcccacacaataataatgggagactttaacatcccactgtcaacattagacagatcaatgagacagaaagttaacaaggatatacaggaattgaactcagctctgcaccaagaggacctaatagacatctacagaactctccaccccaaatcaacagaatatacattcttctcagcaccacatcacacttattccaaaattgaccacatagttggaagtaaagcactcctcagcaaatgtagaagaatagaaattataacaaactgtctctcggaccacagagcaatcaaactagaactcaggattaagaaactcactctaaaccactcaaatacatggaaactgaacaacctgctcctgaatgactactgggtacataacaaatgaaggcagaaataaagatgttctttgaaaccaatgagaacaaagacacaacataccagaatctctgggacacatttaaagcagtttgtagagggaaatttatagcactaaatgcccacaggagaaagcaggaaagatgtaaaattgacaccctaacatcacaattaaaagaactagagaggcaagagcaaacacattcaaaagctagcagaaggcaagaaataactaagatcagagcagaactgaaggagacagagacagaaaaaacccttcaaaaaatcagtgaatccaggagctgtttttttgaaaagatcaacaaaattgatagaccgccagcaagactaataaagaagaaaagagagaagaatcaaatagatgcaataaaaaatgataaaggggatatcaccaccgatcccacagaaatacaaactaccatcagagagtactataaatacctctatggaaataaactagaaaatctagaagaaatggataaattcctggacacatacaccctcccaagactaaaccaggaagaagtcgaatccctgaatagaccaataacaggctctgaaattgaggcaataattaatagactaccaaccaaaaaaagtcaaggaccagatggattcacagctgaattctaccagaggtacaaagaggagctagtaccattccttcttaaactattccaatcaatagaaaaagagggaatcctccctaactcattttatgaggccagcaacatcctgataccaaagcctggcagagacacaacaaaaagaattttagaccaatatacctgatgaacatcgatgcaaaaatcctcaataaaatactggcaaaccaaatccagcagcacatcaaaaagcttatccaccacgatcaagttggcttcatccctgggatgcaaggctgattcaacatatgcaaagcaataaacgtaatccatcatataaacagaaccaaagacaaaaaccacaagattatctgaatagatgcagaaaaggccttcgacaaaattccacagccctttatgctaaaaactctcaataaactgggtattgatgggatgtatctcaaaataataagagctatttatgacaaacctacagtcaatatcatatactgaatgggcaaaaactggaagcattccctttgaaaactggcacaagacagggatgccctctctcaccactcctattcaacatagtgttggaagttctggccagggcaatcaggaaggacaaagaactaaagggtattcaagtaggaaaagaggaagtcaaattgtccctgtttgcagatgacatgattgtatatttagaaaaccctatcatctcagcccaaaatctccttaagctgataagcaacttcagcaaagtctcaggatacaaaatcaatgtgcaaaaatcacaagcattcctatacaccaacaacagacaaacagagagccaaatcatgagtgaactcccattcacaattgcttcaaagagaataaaatacctaggaatccaacttacaagggatgtgaaggacctcttcaaagagaactacaaaccactgctcaacgaaatcaaagaggacacaaacaaatggaagaacattccatgctcgtggataggaagaatcaatatcatgaaaatggccatactgcccaaggtaatttgtagattccatgccatccccatcaagctaccgatgactttcttcacagaattggaaaaaactactttaaagttcatatggaaccaaagaagagcccacattgccaagacaatcctaagccaaaagaacaaagctcaaggcattaggctacctgacttcaaactatactacaaggctacagtaaccaaaacagcatggtactggtaccaaacagagatatagaccaatggaacagaatagagccctcagaaataataccacacatctacaaccatctgatctttgacaaacctgataaaaacaagaaatggggaaaggattccctatttaataaatggtgctgggaaaactggctagccgtatgtagaaagctgaaactggatcccttccttacaccttatacaaaaattaaattccagatggattaaagacttaaatgttagacctaaaaccataaaaaccctagaagaaaacctaggcagtaacattcaggacataggcatgggcaaggacttcatgattaaaacaccaaaagcaatggcaacaaatgccaaaattgacaaatgggatctaattaaactaaggagcttctgcacagcaaaagaaactaccatcagagtgaacaggcaacctacagaatgggagaaaatttttacaatctacccatctgacaaagggctaatatccagaatctacaaagaacttaaacaaatttacaagaaaaaatcaaacaaccccgtcaaaaagtgggcaaaggatatgaacagacatttctcaaaagaagacatttatgcagccaacagacacatgaaaaaatgctcaccatcactggccatcagagaaatgcaaatcaaaaccacaatgaaataccatctcacaccagttagaatggcaatcattaaaaagtcaggaaacaacaggtgctagagaggatgtggagaaataggaacacttttacactgttggtgggactgtaaactagttcaaccattgtggaagacagtgtggtgattcctcaagaatctagacctagaaataccatttgacccagccatcccattactgggtatatacccaaaggattataaatcatgctgctataaagacacatgcacacgtatgtttattgtggcactattcacaatagcaaagacttggaaccaaaccaaatgtccatcaatgataggctagattaagaaaacgtggcacatatacaccatggaatactatgcagccataaaaaatgatgagttcatgtcctttgtagggacatggatgaagctggaaaccatcattctgagcaaactataacaaggacagaaaaccaacactgcatattctcactcataggagagaactgaacaatgagaacacttggacacagggagggaaacatcacacaccagggcctgtcatggggtagggggaggggagagatagcactgggagatatacctaatatgaatgacaagttaatgggtacagcacaccaacatggcacgtgtatacatatgtaacaaacctgcacattgtgcacatgtaccctagaacttaaagtataataataataataataaaagaatgcactctgtagaaagaccttataaatgtaagatatgtgggaaaggcttttattctgccaagtcatttcaaatacatgaaaaatcttacactggagagaaaccctatgagtgtaagcaatgtggtaaagcctttgtttctttcacttcctttccatatcatgaaaggactcacactggagagaaaccctatgagtgtaagcaatgtggaaaagccttcagatctacctcacacctttgaaaacatggtaggactcacactggagagaaaccctatgaatgtaagcaatgtgggaaagccttcagatctgtcaaaaattgttgaattcatgaaaggacacacactggagagaaaccctgtgaatgtaagaaatgtgggaaagcgttccataatttctcttctttgcaaatacatgaaaggatgcacagaggagagaagctctgtgaatgtaagcattgtgggaaagcattcatacctgccaagatcctttgaatacatgcaagaacacacaatggagagaaaccctatgaatgtaaagaatgcagaaaagcattcagcttgcctacttcctttcatagacatgaaaagacattggaaggaaaccctatgaaggcaagcaatgtggcaaagctttcacttcttccagttcttttcaatatcatgaaagaattcacactggggagaaaccctatcagtgtaagcaatgtgcgaaagcctttatttcttccacttcttttcaatatcatgaaaggactcacatgggagagaaaccctatgagtgtatgccatgtgggaaagccttcatttttctagttgctttcgatgtcatgaaaggactcacactggagagaagccctatgaatgtaagcaatgcaggaaagccttcagatcagcctcacaccttcaaatgtatggaaggactcacactggagagaaaccctatgaatgtaagcagtatgggaaagcattcagacctgacaagattctttgaatacagataatgaatgtaaacaattaactgtttgtaataactgtatactaacaaatgttatctttaaataattaagaagctataatagtaaggccgggtgcggtggcttatgcccgtaatcccaccagtttgggaggccaaggcagatcacgaggccaggagatcgagaccatcctggttaacatggtgaaaccctgtctctactaaaaatacaaaaaattagccaggcgtggtggtgggtgcctgcagtcccagctactcggcaggctgaggcaggagaatggcatgaatccaggaggcagagcttgcagtgagccaagattgcgccactgcactccagtctgggcgacagagtgaggctccgtttcaaaaaaaaaagctataataaaatatcccattggtgtcatgtattagatcaaccttatactgttaaattgttattatttggacattgtgagtcagtataaccatgtggataaaatgccaggcatcttttttttttcggaaattttacttttcatgcttatgtacttacatttttatctcaaccctaatttttcttatctttttttttttccagaaaaaaatctcactctgtcacccaggctggagtgcagtggcatgatctcaggtcgctgcaacctctgcctccagggttcaagcaactctcctgcttcagcctcctgagtagctgggactacaggcatgcaccaccacgccaggctaattttttgtattttttagtagagacagggtttcaccatattggccaggctggtcttgaactccagacctcatgattcgcctgcctcggcctcccaaaatgctgggattacagatatgagccatcatgcccagccgcaaccctaatttttcattcagtcataataccaacagttatctcatgtacctctgagtgccttcttcccaaaagccagcagtaccatacctgctgtcagcaagtgtgtaatataccatagtgataaatatgaccaaaagccataaatgactgtgagatgtatgagaatgacacgtcacattagtaagaagagaaaaattttggccatgtttatgatttgaaatatgttttcctctatcacatttagaaatatagttacaaaatgcccttagttttatcctgattcatcatggtcactgaggagcatcgtctcatatgcctggtatgtgacatgtgtctcttcaacagtaaaagacttggcattggctgggcatggtggctcacgcctgtaatcccagcactttgggaggccgaggtcaggagttagagaccattctgaccaatatgatcaaaccccgtctctactaaaaatacaaaaattagcggggtgtggtggcatgctcctgtaatcctagctattcaggaggctgacgcaggagacttgcttgaatataggaggcagacgttgcagtgagccgaggtcacaccattcactccagcctgggcaacaagagcgaaactccgtttcaaaaaaaaaaaaaatgacttggacttgtggtgaggggaggtcatctgtagactcctggacctgtttttgccttacttattctctaaagactgaaatatttcctaaaatgtatgggcactgtttaccagaaagtaccttagttaaaacataaaatcatttatgccttataaagctatattttttcaattgctttactgagtcataggaggctaataaatttgtgtaaattgtctaaatacaagcctgtctttctctgataatgtgctgctgaggctaacttgtcaacagcctgcttatctcagcagtgtaaagttaacagcaacatggaaaagtttcttttatatattatgcaacggcttagaacaattcagtcacttcctttaaggtaccaatgaagctgctcttcagaaacgcttatttaaaactccctaagatcaaaatccaggcaccacaagatgcagcatcagccactgaccaaaccctgtctgtgtgtggaggtgacacacccagtcccagataatgtatccacatcagtgaagggtggagtcgttgattgtcagatcacacaaagtgactcagagcagggaagacagggcagtgaaacctggccaggcacagtggctcatacctgtaatcccaccactttgctagtccaaagcgggtggatcacttgaggtcaggaattcaagacaagcctgaccaacatggtgaaaccctgtctctactaaaaatacaaaaactagctgggcatcgtggtgtgtgcctgtaatcccagctaatcaggatgctgaggcaggagaatggcttgagcctggagacagaggttacagtgaactgagatcacaccattgcaccctgcagcctagtcgacacagcgagactctgtctccagaagaaaaaaagaaagagttggatgcacctgaattcaacccctgcctcatccttctcccttgaaggccaaatacaccctgatacttttcaccaaagagtagaaacaacaccattcacttgaccccaaatgtgactttccacaggatgcaagcacagtgttggaatggccaatgacaatgacaatgaaagtgcaggctgagggtgatgaacaggacacactggagagcctgacattggcctagactatgggggtgtcttgatgcttcacaaagagcccaaggagcaccccaaagaggacactggagcacaggcccaaagggtgttcatatgccaggaaggccactaattttggaagtcagtgacattggtgcctgcttgagtcctgatcctacaaagagtgaccattgaaagctcacaccaggtggggtggctcacgcctgtaatcccagcactttgggaggccgaggtgggtggatcatctgaggttgggagtttgagaccaaccaggccagcatggcaaaactccatctctactaaaaatacaaaaagtagctgggtgtagtggctcacgcctgtaatcccagccagttgggaggctgaggcacgagagtagcttaaactcacaaggcggaggttgcagtgtgctgagatcgcgccattgcacttcagcctgggtgacagagcgagactctgtctccaaaaaagaaaaaaaaagctcacttggttcttcccctgatgcccccactgcaggtgtaccaggtgtaccagctactcacattgaccattggaggagccctttatactgagagaacctcagagccccggaaagctagggatccacaggcagatgcagtactcagtgatgccctctgcaagtgatagtttttgtcttggggctttttccagacattctagtgaaacaaatgtgggtttaggtaagaaataacttttaattctagaccttgaagccagcttgtcattaaaacagttcataacaaaaaagtctaggtactgaacttgtaagtaaaaatagaaatattaaataaatatcttaaaagatattaaataaatacataaaatgtgcttgtatataggcttagaaggggtcagtcaaaaattcaggggccgctgggcagattggctcatgcctgtaatcccagcactttgggaggctgaggcaggcagatcacttgaggtcaggagttcaagaccaccctggccagcatggtgaaacaccatctctatgaaaaatataaaaattagctgggtgtggtggcacacacctgtaacaccagctactctggtgactgaggcatgagaatcacttgaaccagggaggcggaggttgcagtgagccaagatcatgctactgcactccagcctgggctacagaacaagactgtctcaaaaaaagaaaaaagttcagggacctggaggaaggagagaaactgaagcatgctttggtagatagatatttcattttgactaaagatcactaaagagaaaactgttcacctaatggtttgtgaggtaaatactggaatatctagtgggtgtctggtttgtcataggtaacaaacgtagcaccatctaagtcatcatgggaagcttgtttcattgtagtaaggtgctcttgcacaacacaaaggatgggggatttcatgaatcacagccattttcaggattgcccacccacccccatctcctttccacaccccttactctttttctatccatgtctttgatttgactcgtcctgagttgtatccttcatagtaagtgggtaaatgtaagtgaactgtgggtagttctatcaaattatggaacttgagtaaggtgttgtacaggacccaggtctagatgcagttgctgagaagtacaggtggcccctggggctttgacttgcatctgccaagtggggctgtgttgggtgagccaggaactcatggagtctctgctaactctgggtggcttctgaattgcatggttacataactgcttagtgctggagaattgattggtgttcagcaagcaccacacatttgatgtcaggcaaaaagacagcataggtcagaaccttccactgactcacagtgagcgagtggtctttggtgggcattgagaccctggtggaaggactgtgtccacactgtggggaggggccagcagggtgtgtgtggaattcccagaagtaattttctgactgctcacatttccttcacacactacctaggagtgggccagcctggcctgtgtctccacggtccaagtggttcctaagcttgaaaatgtgtaactattggagtgtgggtttccttgtgagctgtgggtgaggcaggctgcctacctgagctgcctcccttttgtttttttacagaatcttgctgccatggaattgctctttccccacgcatctgagaatttatttatttgtttgtttgtctatttttcagatagaatctcactctgtggccaaggctggatcagtggcgtgatctcggctcactgcaacttgcctcccagattctcctggctcagcctcctgggtagccgggactgctggcacaagccaccacaccctgcttttttttttttttttttgagacagtcttgctctgtcacccaggctggagtgcagtggcaggatctcggctcactgcaacctttgtctcctgggctcaagcaactgtcctacctcagcctcctgagtagctgggattataggcacctgcaaccacactcagctaatttttgcatttttagtagagacggtttcaccatgttgtccaggctggtctcgaactcctgacctcaggtgatccacccgcctcggcctcccaaagtgctgagattacaggcatgagccaccatgcccagcctatctcttgatcttattgacaatgcttttcttgtttttattcctaactggaaatacaacacaaagttttacacattgggaaataattgctgggttgtagattatgggtaaattcaaatttactaggaaatgtcagtacagtatgaatgtaacttatgaattaaccatctcacctttcatgcacgtgcctttattcttgtgatttgccaacactttgaattatctaactcacttttcgtcgcccatttactcttaaacagaatctctgtgtgattatttattgctttttatttgttgccattggttgagcatttttcttatataatctttcatcttctgtgtagcagtatccagtcatcctcttacatttgactaatttgtagttatctctctttttctcctcgttttcttttattttaatttgagacatccttgctctgtagcccagctggagtgcagtgttctggtcactcactgcagcatcaagctcctgggcttgagcaatcctcccacctcggctttctgcccagctaattttcaaaaattttttgtagagacaagggtgtcacggttttgcccaggctggtctcgaactcccgggctcaatcaatcctcttgcctcggcctcccaaagtgctaggattgcagacatgatccaccatgctcagcaattagggttttttttttaaaaccaagatatctgtacatgtttctgacaaatattttatttaaaatctttaacaactgcatactaaccaaggttattctgtttttcattttctgttttccattttcattatgattacttgtttttcttttttttttttttgagacggagtctcgctgtgtcgcccaggctggagtgcagtggtgcgatctccgctcactgcaacctccgcctcccgggttcacgccattctcctgcctcagcctcctgagtagctgggactacaggcgcccgccaccacgcccggctaattttttgtatttttagtagagacggggtttcatcgtgttagccaggatggtctcaatctcctgccctcgtgatccgcctaccttggcctcccaaagtgctgggattacaggcgtgagccaccgcgcctggccccttgtttttcttttttattctcattttttcctagataattacaatacttttccatgtagtggctctggcagcattttcatccttcatgcaatcatacagctacctcgatgtcccttctctctgccattctgaaattagacctcactcctttgtgactcttgctccccatctgctatgtgataaagtcctgtctgattacatcgtctccaaagcctctttttgggcttctgtttaccccttggcgtgtcttgtatttactctcctcaaaatatatacttggaggccaggtgtggtggctcactcctgtaatcccagtatttgggaggccgaggcatgaggatcccttgagcccaggagtttaaaaccagcctgggccacacagggagaccctgtctcaaaaacaaaacttatacttgcaagccctaaaccccaacatggtcatatttggacacgaaccctttaggagatcacatacatttataaaggagggctctcacaatgggatgagtaagaagagagagagaactctgtctctccagcatgtgaggacacagcaagaagtcatctagctgcaagccaggaagacactcttcactaggaacaaaattgctggcagcaagatgttggactcccgaagctccagaactgtgagaaaaaaattctgctgtttaagaaactgagtccatggtattttgttataccagcctcagctaagtcatcccaagagtcctcacataaatcatatactatcgtatatgatatcgtgctgcatttggatctacctggaatgtctccaaatcttctacttttcctcttggacccattgtgagaataggtgtgcttcataggcaactactggtgatagtagtgatagcccataacgacttgggacaaaaaaggaacttttacttttttttttttttttttcttcctgagatggagtttgtgctctgttgtccaggctggagtgcaatggcgtgatctcagctcactgcaacttctgcctcctgggttcaagcgattctactgcctctgcctccagaatagccaggatcacaggtgtgcactaccatgtccggataatttttgtattggtagttagagacaaggtttcaccatgttggccaggctggtcttgaactcttgatatcaggtgatccactcactttggcctcccaaagttcttggattacaggcgtgagctactatgctcgccctgttttatgtatataaatatgtgtgtgtgtatttctctttttaataaaatagagactagttctcactatgttgcccaaggtggtcataggccaaacttttgggctcaagcaatctacctgcctcgaccactcaacgtgctgggattaaggcatgggaaactgtgccaggccaaatgaaagagacttagtgggaggctgggcgcggtggttcacacctgtaatcccagcactttgggaggctgaggggggtgcatcacctgagctcaggagttcaagaccagcctggacaacgtggtgaaaccgcatctctaccaaaaatacaaaaaattagccgggcatggtagtcccattctcacagtcacagaaaggttctttcttaaggattccacctgctggaaagcattatatactaccagaacttgttcaattcaagagtgtctggtctcatctccatgtcataattacaaccaaaatcctaaagggactgatttaccacactgtgggtgccataaggcccaatttttaccctcagcagcagctgtaacatcccaagttacagctctaccctccaaagatgtgcctgaggcttgtgcctgccatactaacatgttaatatgtccaaagcttcctgcagagctgtgtcccagtcccaaagtgcccctttctaataagtctatatattggtctcaaacattggactcagtgtcagataaatgctctccaataatccaaagactaacaaatgtctggatttcttttctccttttttttttctttaagaaacatagtatggctctgtttcccaggctagagtgcagtggtgggatcatagctcactgcagaaactcctaggcccaagggattctcctgcctcagcctcccaagtagctgggaataaaggcacatgccactatgcccggctgtttttaaattttttgtgcagatggagtctcactatattgcccaggctgttcttgaactccaaggctcaagtgatccccctacctcagcctcccaaagtgctgagattacagtcatgaaccaatgctcccagccctgaaatggaaaatttcttttgtttgtttgtttgtttgtttgtttgttttttgagacagagtctcactctgtcatccaggctggagtgcagtggcataatctcggctcactgcaaccttccaactcccgggttcaagcgattctctgcctcagcctcctgagtagctgggattacaggcacctgccactacgcccagctaatttttgtatttttagtagagacagggtttcaccatcttggccaggctagtcttgaactcctgacctcaggtgatccacctgcctcgacctcccaaagtgctgggattacaggcatgagccactgcgcccggccctgaaatggaaatatttcaaagggaaaacatctaacgttcaagttattatctatagagcagttaacaggaactatcatttagggtccatcgtgaggcagaaatttaaaaataataagtactgaatttatttactccaagaaaagtaaaagctaaggcccagagtgtggcaaggcaagggttaaaaagaaaaaagaaaagcacaagttttcctctgcctagcagctcacttccaggaccttatcaagaagataacgatgtccaaatagccaaggccaaaggaatgggctccagacacccctcccttccagagcaatgttgaaggaaaaaaaaaaaagagacagattcttttactgttactcttttgcaagtcttcttaagcattattatgttttacaaatgtctgtatttagccagttcttgtttttctttcaatgcagctacaaggacactggctatgcaaggtcataaattatgttatgctatagattacatgacctgtcactgtatgattaactgcttttgtttggcatctgtaagacagcgtataaaaaccccactttgtcttcgttcagtcctcagctttttggatatgaatcgtctgagccagtgcgtacctaaaatataaacaaatcctcctgtactccatattggtctctccttcctcagtttaccacaacaatgggattctaggacactaggtatgaagcaaatatgaggaagttcagggaacaagctgacttaatgattaatgctgaaggttctgcagcttggtttaagttttctcctcccatcctccctgatgaatttgataaagtttaaagggatggtttcaccaggggccttttccattgactgcaaggaggtcatccgcctggtaaatcctcagtaggccaagcctcttatgtggccagaatgatccagtccataaggaaataccacctgctgtgttttacaattagaccatccaagggggtcagggtttccccggggagtctggtgggctttttatgggtttttttgtttttgattttttttttttttgagacagtgtcttgctgaagttcagtaacctgatcacagctcacagcagcctcaaactttggggctcaagtgatcctcctgcctcagcctcctgagtagctgtgattacaggtacacaccacctctcctggctaattaaaaaatagatttatggagatgggagtgtctcacttcactgctcagggtggtcttcaacttcgggcttcaagtgatcctgccactttggcctcccaaaatgttgggattgcaggcatgagccatggcacctggcctcccaggctgttgttgaaaggtctttgcaatctctaagagttctgcagcagtttattccctgacagcgagagtctcatcctttgatcccattttgcagcagtagttgggtgttcacttttctttccataaggaagcaagcttgccagtgaccctcatccccctcctcatcgatgacttctttgtcatcagagccttcctcttcataaattcccacggaatccaagttttcacgtcccgattgggcttagttatgatagctactggctcacacaagctgcaacagcaccccgtcccatggaagccacccgactctctcctccctgagtttcctgtcctgggagcccccatctctgctctcccgggctccgggccctagagccgcactgctgcagagcccagttcccagggcagctccctccacctatccacatccatctccagctctccaccctctctcccaccagcctggcctggaggtgctgcagtgtcattgactgcgagtccctcagctgccacctccaccgcgatctggaagtctttcaaatgcccttaagttatcttagatttttcctcccccactttatacataagcataggaggagagcagggactctgctggtgtcttatttacacaatgggattgaaggtgtttgtctcgcgaaactaatcgatggggtgagaagtagctgaataacctgcagggggcagcagagcccaaggccagtgattccacgttgaggacagtctctgcagcctgcaaagggagggaaagagagtttccctgggggcttcgcgggcagcccacccccttctacaagtggcctccagctgctcagagcagctccagaaagggtgtggattccgagaagctgcagagccctggaaagcagaagacccatgtgcagacgcatttgtggcgtctctgtcctttctggtgttgtacctctggagctgtcttctgggcagggtttggggtttgacatgcatggggtcgttggggtcagagttatttgtatagataaagaaaatgtgtggccgggcgcggtggctcacgcctgtaatcccagcactttgcggggccgaggcgggcggatcaagaggtcagaagatcgagaccatcctggctaacacggtgaaaccccgtctccactgaaaatacaaaatattagccgggcgtggtggcgggcgcctttaatcccagctactccggaggccgaggtaagagaatggcgtgaactcgggaggcggagcttgcagtgagtcgagatcgcaccactgcactccagcctgggctacagagcaagactccgtctcaaaaaaaaaaaaaaaaaaagaaagaaagaaaagaaaatgtgtgaagatcaggctagagctagagacagaattgtttggtggcgtcacctggataaagggttcatgaagttgacagtttacttaggtcagaaacaaaacctggtgagagtttcctgctggtgaaaatgaagatctgaaaggaggaagcattttcacaaggggatgggggtgtgtgagcaaggcttggccacgcctcatccccaattccggcccgctcgaggacatatgcctctcctcctggtgcagtcgtgcctggcctggtctcggttcccctgctgctctgaggccagcagttggctcctatggacactgagtctgaaattccctgcacactcctgtgaccccgtgcagaacgaaggagcggggactgtcccttgagtgaggatgacgctagtgttctcttctatcaatagcaagtttggctgaaatgcaaatatccaataaccagagtgcagaaagcagctcgcccttagagaagctgtggctagaatccgtcagtctggctctgcggggcctgatacccagggcttcagctgtcactcagatgtggggggcgggacctagtatttcatccaatcagaggtgctggggcgtggcactgcccacagttcatccggaaatggagggggtcgctttcctcaccttcctcgctgcgcgggcggcggttggtaaccggtcagaccagcccgagagggacctggtgcctgtacccaggcttctgtcgctctgtcgcctgcgctatgccctgctgtagtcacaggagctgtagagaggaccccggtacatctgaaagccgggaaatggtgcgtgtgcgggaccagatgtcgtgagacgggggaggggctgcctggaacaggcgggaaccggctgtggcgggacccgggcctccctgtgggcgactccggggtctgggaccgagtcctccttgagcagttcggccctcggtccccttggccgctggacggggctgggccagcagccaggacccgggcgtcctgtcccgtccctgcgcggcgactgcggccgcggcccctgccccggagccctctctgggcagttccgctcccgcagccccgcgtctccccagattgtgcggaagcaacgggagggtcatggaggcatcctgactcgggtgtggggttcgtgcgtgggaggagcagtggtctgtggggcccccagtccccactttctcctgttaaaaattaaactgaggtacgttaacaattaaagagttcatttgagcaaacagcgattcacgaatgagaaacaccccgtcctgggttgtggtttgtcaacggaaaaagccaaactatgtaaaataaagaagtttattcagagccgaataggagagaccttggccgagggaaacacaaccccaagcagcctggagtaagtggtcccgaggcggctcaagacagtttggttttattcatttcagagagacaggaattgcagggaaaatgatgaatcagtgcctgaaaggtgtaagttccattggcagaaagggtgggacctgtggaaggggggttagaaggcacaggtggttgagggattctgtaggtggcagctggttgagagtgtgaagtttgtctaaagtttggaggaggtaggaaggaagggggtctgttatctgccacttgattccatcccagccagaaaacagacctgtttctctagattttatgaattctgaggcgtgactttacttttgccttgcgtggccttaggttttgtttgtaagttagtatcttcttgccacaagcagtctgtttttccattctatctatttttacatgaatgtgtgggagagggtataaggagacctgtctcacctcccatcctgtcatacagaggcactcaattttcagggttttttgcgggtcctgttggccaagagccggtcacttcacttagctggaaaggtactttgtttttatttgagacggagtctcctgtcgcccagactggagtgcaatggcctgatctcggctcactgcaacctccaccttccgggttcaagtgattctcctgcctcagcctcctgagtagctgggattgcaggcatgcaccactatgccctcctaatttttgtatttttagtagagatggggtttcaccatgttggccaggctggtctcgaactcctgacctcaagtgatccacccacctcagcctcccaaagtgctgggattacagatgtgagccatctcgccgggccagaggtatgtttttatttttagtttaccagtttaggggtaagcttttataagttacgtgaggagacaaaccagataaatgcttgattggttgcagagatgcagttgccttatttggacttgtcactccgaaataatagaaaggtcaagatttcagttggaagagtttattcaagcggaaggatagcagtggcccatttgggaaaaacacagactctagggaaatagactcagtactccaaaactggaagttaagttcttgcttgtattaccaggaaaagaggtcctgatcagaccccaggagagttcttgaatctcacacaggaaggaattcaagacgagtcacaaagtgcagtgagaagagagtttattgaaagctactctgggccagcatgatggcttaggcctgtaatccaagcactttgggaggccaaggtgggaggataacttgaggtcaggagttcgagaccagcctgggcaacatagtgaaaccccatctcttccaaaactagcaaaaattagccgggtgtggtggcctgcacctgtagtcccaggtgttcaggaggctgatgtgagagaatcacttgaaccccagaggcagaggttgcagcccagccgaggatgtaccactgcactccagtgtgggtaacagagtgagaccccatctcaaaaaccaaaacaaacaggaaagaggtcaagaccaacctggccaacacagcgagaccctgtctctatttaaataaataaataaataaataaataaataaataaataaatagaaaaggaaaaagaaagaaaaagcttctctgtttcagagtagggcatcctcatacagcaagtggaggaacgtactgtctttaagtttttcttatgtagggatcttttctatgtaaagaataaactacctgtgcctatgtgcatgtgggctgacagcatcacaaaatttattactctgttgatttaaagaaaactatcctttacattttagcacccaagtgcattaaaacataactataattatcttgaaagcacatattgttataggtattgggacatcaggacattctattgttgtgggagtgtaaggatacttgcaggcatcttcaggctgttttcttcatgggaaacattttgtgatcatgggttgtgactgacaaggagtgtttcttgttagtgtcaagatggagctgaacttaaattggtgttactctggctcccctaggcacctgcttccctaacacttgtataggcaaaaggcaaataaatgtaacaggattatgttttccatagaaggctgatgtatgagatacaacaattttttttttttttgagacagtatcttgctctgtgacccagcctagagcagtggtgcgatgatggcttactgcagccttgacctccccagctcaagcacctccgcctctcaagtagctaagactacaattgcccaccagcacacctggctaattttttattttttacagaggttaggtctcgttatgttgcccaggctggtctctggctcctggcctcaaacagtcctgcttccttggcctccaaaagtgctgggattacagatacagatatcagccactgcacctggctaacaacttaattcgtaatggtttacttttttcccccagagcttgttttcttttctttctagctggtttttatttccttttcaatttaagagtgaatttaacattccatctgaagacaatctgatagccatgaaatctttgtgtgagaaagtagtctctgggccgggcgcggtggctcacgcctgtaatcccagcactttgggaggccgaggcgggcggatcacgaggtcaggagatcgagaccatcccggctaaaacggtgaaaccccgtctctactaaaaatacaaaaaattagccgggcgtagtggcgggcgcctgtagtcccagctacttgggaggctgaggcaggagaatggcgtgaacccgggaggcggagcttgcagtgagccgagatcccgccactgcattccagcctgggcgacagagcgagactccgtctcaaaaaaaaaaaaaaaaaaaagaaagtagtctctgtagtcttactacagagatcagtagtgaagaggggcctggtaggatggctcacacctgtaaccccagcactgtgggaagccaaggcaggtggatggcttgatctcaagagttcaagaccagcctgggcaacatattgagaccccatctcatttgtgaaaaatcatattaatataagttaaaaaaaatagtggagagggaaagggtctttcctgtttcccttcagtcatttacaacattttacaaaacgctataggtaggaaagaaggcgaatctgtaatcagggaatggaggattccagctagctatgtgaaagctgtgtgtcaggtcactcaaccccatgatcacattgcttcaagataatttaaagatctaccagcttaaatttttgaattactttgttgtttttgttgtttgttttgagatagggtctcactctgtcacccaggctggagtgcaggcgcgatctcagctcactgcagcctccgcctcctgggttcaagtaattctcctgcctcagcctcccaagtagttgggattacagacatgtgccaccacactcagctgatttttgtatttttagtaaagacagggttttaccacactggccaggctagtctcaactcctgtcctcaagtgatccacccaccttggcctcccagaatggtgggattacgggtgtgaaccactgcgcccggcctgactcatttgttcaaacagcctatgtaggtagaaaatttctaggtatgtaattccaaggtaataggtaaattgtgcctgattaagcatgaattttatttccctatacattagtaatttctgagagttgtatttaaattcgatttcagggtccttaggtaggaccttaggacactacacacagttcagtctcattgcttgttatttaaatttttccacactttccagggcaactggttcccccttatattttccaaatatatgggatgccggatctcaaatcctccaccctcataccacagcctaactcttcaagggcttgcagtgaaatctgtttctgaacatttcacatgagaggaaagcagagaataaccactagacatttgcctgaaaaatcctttctgcctctcctccttttatctttcctagacacagacaccttatcaggatgtctttgggatgaggttcctttatggaaactttgcagggtgatatgtcttcagtacaccctcctatcttttccagattttgagttttagaactgcctgtagctgacccaagacccccacaattgccatgtctcttggagggtctagtgggtatctgtgcctaggggagtggggcctcccaagggagcagctgaatgactagtggtggaggagatgcctggtatacttttcatctagatacccagttcgtgggtgctcaccttctctctcctaacttcagtttccattaattggagacacatggccaatcagctaattggatgttgctattgaggaaaaacagaaatgattcctgtcctttggattgtctcaactgtgaagagagaaatatcccaaaagacaaggaaaggccaccccaacaaggttgtatttagctgtcctacagggaggtggtcaccagaatgcagttgtggaacaaatatatgtgagttgaccacatggaggaactgggaggaggtgtagaactggaaactctgttgagtttgagtaaagtttacttctgttatgagaatgttaaatctataatcaaaatgcatgctaaggtaacatatcaatataagaactcactataaccggcaactctagaattaattaaattattgtatatggagatgacaggtagtggattgattattctcctgtagataaccatttgtccctgctttttctgttaagtgttcaccacttgtatcattggctgacaatacctggtttgtcatagtttcacattaccttaaatagatgcccagactgggtgtggtggctcacgcctgtaataccagcactttgggaggctgagactggcatatcacctgaggtcaggagtttgagaccagcctgaccaatatggtgaaactccatctctattaaaattcaaaattagccaagcatagtggtgcatggctgtaatcccagctactcgggaggctgaggcaggagaatcacttgaacctgggaggtggagattgcagtgagccgagattgcgccattgctctctagccagggcaacaagaacaaaattccgtctcaaaaaaaaaaaaaacaacatagatgccctcgtttcacaatttgctgttttccattggtctatctttccatctgtctgttaataccactttctcttaattagtatagagtacaaagctgcagtgtgtagtagggatagtgcctctctatcttagtcatcttgggctgctatatcaaattaccatagactgggtgacttaaagaataaacatttatttctggcagttcttgaggtcatgaagtccatcttcagagagctggcagatctagtgtccagcaagggcccgcttcctggtttgcaaatgatcgtcttcttgtggtttcttcacatgacagaggagaggaagccggctctcctgtgtcttcttataagagcactaatctcattcagaaaggatttactcctatgctctcatctaatcctaattacttcccagagatgtcaccttctaatactatattgggagtaggttattaatgtatgatttttttggattgatgcaaatattcatgccataacacctcccaacaatattctatagaggatcttgtctatttttagtcattgtcttctatttcagtctttagaagtacctttttcttaattttagtgagggaaacaaactgcactgtaaatttcataaaatataactgtaggcatatttcagagaggttacatcatagtgatacttaatctccttttaaggacacatggcatttttccatttattgcattttatactgatgtttttcagtataaactttttgcataataatcattttttatccttcttgagacttttttggacttcaagaaaattagttttaaaattagtggccaggcacggtggctcgcgcctataatcccaacactttaggaggtcaatgcatgcagatagcctgagttcaggagttcaagatcaccctgacgagcatggagaaaccccatctctactaaaaacacaaaattagccaggcgtggtggcagaggcctgtaatctcagctactcaggaggctgaggcaggagaatcgcttgaacctgggaggtggaggttgcagtgagccaagatcccaagatcgtgccattgcacttcagcccaggcagcaagagtgaaactttgtctcaaaaaaaaaaaaagaaagaaaataaattagtccagcctgggcaacatggcaaaccttgtctatacaaaaacttacctggtcatggtgatgtgcgcctgtagacccagctactcaggagactgaggtggaaggatctgttgagcctaggagttcaaggctgcagtgagctatgattgcaccactacactccagcctgggtaacagaacgagaccctgtttcaagaaaaaagaaaagacacaaaaaaattagtttcaatatgctatgctgttgttgctgataattaaaattcactgagatttatttctgtatagagtgtgcattctagaaactaactaaaagtattacatatgcacaaaatacataaaagagttgcacaatgaatccaaatattgatggagtcagtactgtgaacgataactgccttacttttctttatacttccccaacctgggtacccatccacatcagtatattttatttttgcatgttttttatgcaaaccaatatgtgattttttttttttttttttttgagacagagtcttgccctgtcgcccaggctggagtgcagtggcgtgatctcggctcactgcaagctccgcctcccgggttcacgccattctcctgtctcagcctcccaagtagctgggactacaggcacccgccaccccgtccggctaattttttgtatttttagtagagacggggtttcaccgtgttagccaggatggtctcaatatcctgacctcgtgatccgcctgcctcagcctcccaaagtgctgggattacaggcgtgagccactgcacccggccaatatgtgatattttatattggattttatttaaactcagttatgaaccttacatggaatgatagttaattcactttcttatttagttgattttattatttagaacagtggttgtttacccaaaacattgagcagataatccagagttccctcatttttcttccaagctcatagttccccctattttaaacatcttgactggccaggtgctgtgcctcatacctgtaattctaccacttagagaggctgaaatgggaggatagcttggactcaggagttggaggccagcctaggcaacatagcaaggccctgtttcaaaaaaaaaaaaaatgttttaaaccaaggaaaccatattgactgtgtgtagtgtatcctataattgatgcaagaatatattacatgtgaacacgatgaaaattgaagaagccaatattattattacctaaagtccatcttttacatgaaacttcactctttttgggctgtggtttaagacaactacgtgtgtcatgtatccaccatcacagtcttatacagaagcgtgtcacaggcctcaaaatcccctgtgctcttcctaatcatagctctcccctccctcttctgccacccctatttatccctggcaacaaatgataatgttcctgcctcggttttgcattttccagaatattaaatatttggaatgatgctgtaagtggccatttcagacttgcttcctcgatgtaaaaatatgcattgaaggtctctcgatacctttgttgcttgacaactcatgtattttttatttttatttatttatctaaaaaaaattttgtttttgaatggtgtgaacccaggaggcggagcttgcagtgagctgagatggcgccactgcactctagcctgggtgacggagcaagactccatctcagaaaaaaaaaaaaaaaaaatttgtttttgttttgttagagacagggtctcaaacaccccagctcaggtgatcctcccacctcagcttcccaaagtgctgggattccacttgtgagccatcatgtccggccactcattttctttcatcactgagtaacattacgttggatgggtgttaccatagtttctttattcacctactgaaaggctcatcttgagcctggtgtgatgcctcatccctaaattcccagctacatgggagacagaggtgagacgattgcttgaggccaggagttagagaacagcctggtagatacagtgtgagacctcatctatttttttttaaaaaaagactcaccttgtttgagtctagtttttggcagttatgagtaaggctgctaaaaacgtctgtgggaggacttttgtgtggacatcagttttcagttcatttgggtcaatattgtaggattgagactactgaatcagtaggaccatgcttattttcttcagacctccgcagactgtcttccgaattggctgtagaattttccattcacatcgatagtgaatgagtgttcattgtcattggcattaggaagtgtcagtgttttggattttagctactgcaccaggtatttgctgctgcctcattgttttcttttttttctttttttctttgtttgtttgtttgtttgtttggagatgcagtttcgcttttgtttccctggctggagtgcaatggcgcaatctcagctcactgcagcctctgcctcccaggttcaaacgattctcctgactcagcctccagagtgtctgggattacaggcgtgcgctgcctctcctgaccaatttttgtattattagtagagatgaggttttaccatgttggccaggcaggtctcaaactcctgacctcaggtcatccacctgcctcggcttcccaatgtgctggattacaggcgtgagccactgcgcccggcctgttttcatttcgctctttaatgacacgtgatgtagagcatcctgtcatatgtttgccataattacagtctttggtcgggtgcggtggctcacgcctgtaatcccagcactttgggaggccaaggcgggtggatcaggaggtcagatcaagaccatcctggctaacactgtgaaaccccgtctctactaaaaatagaaaaaattagccaggcatggtggcgggcgcctatagtcccagctactgggaggctgaggcaggagaatggcatgaacccgggaggcggagcttgcagtgggccgagatggcaccactgcactccagcctgggcgacagagcgagactccgtctcaaaaaaaaaaaaaaaaaaattactgtctttgtggggaggtatacttggaaagatcttgtttttttttttttttttttttgagactgtgtctggctctgttgcccagtctggagtgcagtggtgtaatctcggctcactgcaacatctgcctcccaggttcaagtgattcatctgcctcagcctccagagtaggtgggattataggcttacaccaccaggcccaactaatttttgtatttttagttgagactgggtttcaccatgttaggctgatctcgaactcctgacctcgatgatccacccacctcagcctcccaaagtgccgggattataggcatgagccactgtgcctggctttttgcttcttttttgattggttgttttttttcttatagaattttaggacttcttcataccttttggataccagtccatcaccagataggcgttctgcaattattttgtcccagtctgtcacctttttattctgttaacaaagtcatttccaaaacagacagttttactttgtttgttttgtttttaaattatactttaagttctagggtacatgtgcacaacgtgcaggtttgatacataggtataacatgtgccgtgttggtttgttgcacccatcaacttgtcatttacattcggtatttctcctaaggctatcctcctcccagccctccagcccctgacaggccccggtgtgtgatgttccctgccctgtgtccgagtggtctcattgttcagttcccacctatgagtgagaatatgcagtgtttggttttctgttcttgtgatagtctgctgagtatgatgatttccagtttcatccatgtccctgcaaaggacatgaactcatccttttttatggctgcgtagtattccatggtgtatatatgccacattttcttaatccagtctatcattggtggacatttgggttggttccaagtctttgctattgtgaatagtgaatattgctttatagtagcataatttataatccttagggtatatacccagtagtgggattgctgggtcaaatggtatttctagttctagatccttgaggaatcgccacactgtcttccacaatggttgaactagtttacagtcccaccaacagtgtaaaagtgttcctatttctccacatcctctccagcacctgttgtttcctgactttttaatgattgccattctaactggcgtgagatggtatctcattgtggttttgatttgcatttctctgatgaccagtgttgatgagcattttttcatgtgtctgttggctgcataaatgtcttcttttgagaaatgtctgttcatgtcctttgcccactttttgatggggttgtttgtttttttcttgtaagtttgtttgagttccttgtagattctggatattagtcgtttgttggatgggtagattgcaaaaattttctctcattctataggttgcctgttcactttgatggtagtttcttttgctgtgcagaagctctttagtttaattagatcccatttgtcaattttggcttctgttgccattgcttttggtgttttagtcatgaagtccttgcccatgcctatgtcctgaatggtattgcctaggttttcttctagggtttttatggttttaggtctaacgtttaagtcttaatccatcttgaattaatttttgtgtaaggtgtaaggaagggatccagtttcagctttctacatatggctagccagttctcccagcaccatttattaaatagggaatcgtttccccatttgttgtttttgtcaggttcgtcaaagatcagatggttgtatatgtgtggtgttatttctgaggcctctgttatgttccattggtctatatatctgttttggtcccagtactgacagttttactttgaagtccaatttatcgattttctcattcacagatcatgctttttgtgttgtgtgtgaaaccttattgccaaatccaaggttgtcatggttttcacaagtgttacgttctagaagttgtgagttttgcattttccatttaagtaaatgattcattaggaggtagttttgtaaaaggtgaagttctgtatctaattcatttctttgcatttgctaatccaggtgtttcagtaccatttgttgtatgccaccatgtctaattatttatttattttattacagagacggggtctccctatgttgcccaggctggtctcgaactgctgggctcaaatgacctgtctgccttggcctctggttttgaatttttaatacatgtctttatagtagatttttctttttttctttccttttttttttttttttgagacagagtctcgctctgtcacccaggctggagtgcagtggcgccatctcggctcactgcaacctccacctcccaggttcaagccattctcctgcctcagcctcccgagtaactgagactacaggtgcctaccaccacgcttggctaattttttgtatttttagtagagacggggtttcaccatgttagccaggatggtctcgatctcctgacctcatgatctgcctgcctcagcctcccaaggtgctgggattacaagtgtgagccaccgcacctggcctatagatttttctacgttccttgtgcctctctgtcatcttatggaatcttctcttgtatagttcattgagtgtttttaatcatgaggagatattaacccatttatgctggagattgcaattttttgaattgcagatgtgtgagaaatcagactttggcaataaccttgaacagtaggatataaataactcccacatgcttagcgttccaaaaatggaacactactcataaatgggctaaggcttgtcagataccttttctgcctctatttattcattcttgtcgttttttgttcgtttggagacggagtctcactctgtcatccaggctggagtgcagtggcatgatcttggctcactgcaacctccatctcccaggttcaaatgattctcctgcctcagcctcccaagtaacagggactacaggtacacaccaccacacctggctgatttttttttaatattatattttaagttctagggtacatgtgcacaatgtgcaggtttgttacacatgtatacatgtgacatgttggtgtgctgcacccattaactcgttatttacattaggtatatctccttatgctatccctctcccttccccctaccccatgacaggccccggtgtgtgatgttcccctccctgggtccaagtgttctcattgttcagttcccacctatgagtgagaatatgcggtgtttggttttctgtccttgagatagtttgctcagaataatggtttccagcttcatccatgtccctacaaaggacatgaactcatccttttttgtggctgcatagtattccatgtgtatatgtgccacattttcttaatctagcctatgacatctgggttggttccaagtctttgctattgtgaatggtgccgcaataaacatacatgtgcatgtgtctttatagcagcatgatttataatcctttgggtatatacccagtagtgggatggctggatcaaatggtatttctagttctagatccttgaggaatcaccacactgtcttccacaatggttgaactagtttacagtcccaccaacagtgtaaaagtgttcctatttctccacatcctctccagcacctgttgtttcctgactttttaatgattgccattctaactggtgtgagatggtatctcattgtggttttgatttgcatttctctgatggccagtgatgatgagcatttttccatgtgtctgttggctgcataaatgtcttcttttgagaagtgtctgttcatgtcctttgcccactttttgatggggttgtttgattttttcttgtaaatttgtttaagttctttgtagattctggatattagccctttgtcagatgggtagattgtaaaaattttctcccattctataggttgcctgttcattctgatggtagtttcttttgctgtgcagaagctctttagtttaattagatcccatttgtcaattttggcttttgttgccattgcttttggtgttttagtgatgaagtccttgcccatgcctatgtctgaatggtattgcctaggttttcttctagggtttttatggttttaggtctaacatttaagtctttaatccatcttgaattaatttttgtataaggcgtaaggaagggatccagtttcagctttctacatatggctagccagttctcccagcaccatttattaaatagggaatcgtttccccatttgttgtttttgtcaggttcgtcaaagatcagatggttgtatatgtgtggtattatttctgagggctctgttctgttccattggtctatatctctgttttggtaccagtaccatgctgttgcgcctggctaatttttgtatttttagtagagatggagttccaccacgttggccaggcaggtctcaaactgctgacctccataattgcacctgccttggcctcctaaagtactggaattataggcatgagtcaccacacctggctgctaccatgatttattatcattacttattggaaaacaaaacttaaaacttaccagcttaaggaattttacacgtacacttgagatagtttgacaaatctacataagttctgtaagatgaattctattgtattttgcttattgcaattatcctgaggtttcacgcatgttgtagtatgtaacaagacgttttcttttttttttttttgagacagcaggctggagttcagtggcacaacctcggctcaccgcagcctctgcctttcaggttcaagcaattctcctgtctcagcctcctgagtagctgggattacaggcatgtgccaccacacctggctaattttgtatttttagtagagacaaggtttctccatgttggtcagactggtctccaactccaacctcaggtgatcgacctgcctcggcctccaaaagtgctgggcttataggcatgagccacagtgcccggccaagatgttattttctaagtataaataatatttcaatgtattgtgtccggaattggtgggttcttggtgtcactgacttcaaaaatgaagccgtggacccttgcggtgagtgttacagctcttaaggtggcgtgtctggagtttgttccttctgatgtttggatgtgttcagagtttcttccttctggtgggtttgtggtctcgctggctcaggagtgaagctgcagaccttcgtggtgagtgttaacagctcttaaggcagcgcgtctggagttcttcgttcctcctggtgggctcgtgatctcgctggcttcaggagtgaagctgcagacctttgtggtgagtgttacagctcataaaagcagcgtggacccaaagagtgagcactagcaagatttattgcaaagagcaaaagaacaaagcttccacagtgtggaaggggacccgagtgggttgccactgctggctcaggcagcctgcttttattctcttatctggccccacccacatcctgctgattggtatagccgagtggtctgttttgacagggcgctgattggtgcgtttacaatccctgagctagacacaaaggttctccacgtcccccccagattagctagatacagagtgttgacataaaggttctccaaggccccaccagaatagctaggtacagagtgtcgattggtgcattcacaaaccctgagctagacacagggtgctgattggtgtatttacaaaccttgagctagatacagagtgccgattggtgtatttacaatccctgagctagacataaaggttctccaaggcctcaccagagtagctagatacagagtgtcgattggtgcattcacaaaccctgagctagacacagggtgctgattggtgtgtttacaaaccttaagctagatacagagtgccgattggtgcatttacaatccctgggctagacataaagtttctccacgtccccaccagactcaggagcccagatggcttcacccagtggatcctgcaccagggctgcaggtggagctgcctgccagtcccgcgccatgcgcccgcactcctcagcccttgggtggttgatgggactgggtgctgtggagcagggggcggcgctcatcggggaggctcgggccgcacaggagcccatggaggaggtgggagactcaggcatgatgggctgcaggtcccgagccctgccccgtgggaaggcagctaaggccgggtgagaaatcgagcgcagcaccggtgggctggcactactgggggacccagtacaccctctgcagccgctggcccaggtgctaagcccctcattgcccagggccagcagggtcggccggctgctccgagtgcggggccgccaagcccacgcccacccagaactccagctggcccgcaagcgccgcgcgcagccccagttcccgctcgcgcctctccctccacccctccctgcaagctgagggagccggctcccgccttggtcagcccagaaaggggctcccacagtgcagcagtgggctgaagggctcctcaagtgccgccaaagtgggagcccaggcaggggaggcgccaagagcgagcgagggctgtgaggactgccagcatgctgtcacctctcagtatgtatatacttaccacattttgtttatccattcagccgtcagtggatatgtgggtggctgcattgctcattactgccaccccaggaaggttgtatagtggttgaatctgtgcttattacacctggtatctcttaggagtttctcgtttggcctcttgtgcacttagggtgccaggttttgcttaggaatgtcccctttcctttgcccttcttaccagcatctatctagctgcattctgacaggataactgcaaagtgaatgattcctgggcatcataatggatgtttctttctacttaggtgtttcccctcctctctgcttatatctagcatgcctgttttgggtggtccctgggggtgtgggctttcccctggacttcccctcctgctcttggctagctatctgccttctctaacaatgtcatcaaagattacactttgggaacaggcattttcaaggaaacacagcctcaggactgctaatgttaacttttttctgcctattaattcataggactccgttatgacaggtgctacagacccacagtccaaagagacattagggacagcccaggcagctcgtttttctccctggatttgtagcaggacaagccgcagacaaaacctctcagacactgggttagagaaggaagtggctttattcggccaggagcgtcagcagacttgcgtcttaaaaaccgagctcccagagagagagaaattcctgccccttttgaaggcttacacagggatccacatgaaaggatcgtgatcaattaaacaaggatggagtgtgtaattggggctgcatgcatcggtaacaggacagagcagaacagaaagactttcacagtgctttctcatacaatgtctggaatctatagataatacaagtggttaggtcaggagttgatttttaactaccaggcctggggtgtggcaccgggctgtctgactattgatctcatttctgccttcctttaacttttgcttcctctttcttgttctgaggtatgagacaataagagaggtggtctccttccttattcccccctttgagaatctcacttattaatgggagttctcactttcatccttactacctaggtcttcctgcaagacagatcaatagtggttaatgtaatacacttgtgctgaaacattttggtggaccaaggtagtgacaaagcttctcattatttgaaggagcacaggtagcaagcaggggagtaacaagcaggtttctattattattattatttctattataagtgttttaaatcctcctagtgctggaaaccattttccaaatacagatttaggattaaacccatgccaaagctgtacaggcacatgtgccaactttgttatgtccttaactatgtttttgactacttgcccttgattatttatatgcagacagcaattggttaggttaaattttccatagacccctcctttagctgctagcaagtagtctagggccagtctattttgatagatagcatttttcatctgggtttcttaccgggctaaaacagttaaagctctgccagttttagtagtgattatttctaagatagcttgtaaccatatgatccggttgagcatgtaaatgggggtctcttttttttctgttttagctattttttttacttctattacctagaaaagaactagtttttaaatcttatttcaaagactgtgatcatgggaggctcagatgggttatggtacacatcaggtcgggcatttcctgggttacacactttgtactgagtggtgttatacaggcaagttccttttaaagttcctaggcattcataataactagaaaaccgaaagattgttttaacttgttgccctacctcagtaacctgatgaatacactgggaacaatcttccatgtggggaaaatcagttgaagtccttattctacaagtccaaattttaaggagaataagtcccatgatgagtttcctcatgctttggccgcacatagaccagtcagcttccaggtgtgacaggagcagggcttgtcgtctttttcagagtcactttgcaggggttttccaggtttggtcctgcctcccaggagctgcaggttttacatgactgtggtggatccaggccgggattccctctaccttcacggtggtgtgagtggtctgtggtcccttccaccatgggcacaagggggctacattccagtccttgatccacactctattacctggggagaaagggtgaactggggagaataagctaatggggcgtttctcgtttacctaggctgagattgttcgtgtaatttttcgtaaggcctgtagctgtcgctgtaacttaatttcacctaattctcagggagtgcctggaagtccccatactatgggaggagggctatgatataatatttcataaggggaatatcctgtttttctagaaggggtaaatttaatcttaataccacagggagagcttgtacacactttaatcctgtttcttgacacactttccctaaactatttttgatagtccaattcatccactccacctttccggaactctgaggttggtaggcagcatgcagtatccatgtgatccccaatacctttgctgtcttctgtaccaagtcagccacaaacgctggcctgttatctgagccaattcgtaagggcagttcaaacctaggaataagatcttgaagaagcacacgggttacttcaccagctttctcagttcgcgttggataagcttccacccacccagagtatgtacacacaagaactagtaaatacttgttatcttcacattttggcatttctgtgaagtctacctgcagatcttcaaagggggctgctccataagcttgtatgccagccgggacggttggaccctgccttgcattgtgttgttggcaggtaatacatcgctgtgccactgtttcagcaagggctgataaatgtgagatgtagaagtaccggcttaacaacttttgaagtgactcctggcctagatgggtggttttatgcacagccagtatgactgtggctcccagcagctgtggcacagctactctcccatccagtaaccacatccatccttcttccatcacctgtcctccctctgcctggagaaagtccttttcttctttagaataagtgggtacaaggtaggccactggccttggccagggccccacagtctgggttagaactccaactgcctttttttctttttctgacacagtgtaaaaggctttgttagattaggtagccccagggctgggactgacataagtttttcctttaactcatgaaaggctcactgttgttgggattcccattcaaaaggttcccagcacccctctttgtgaccccatatagaggtttggccagtactgcaaagtttgggatccacagtctgcagaaccctactgctcctaagaattctctcacctgccttctggttttaggttgcaataggctgcagatgacctgctttctttctgagcttgattgaccaagcacaagtcctgtactggcctgtagttcttggtccctggcttgggaacaggcaggagggtagtgttccatggagactggcaaaggactataattccaaaggctctcaagtgcttgaggtggacctggattccttcaagagcttctctagggaaccgggtactgtttttgcctgaccggctgggccccaggcttaacttctgtaggtacgggggtttggttgactgccagccctggagggttgtcttctgcccacacctttgaccatcacttagccagagctggtcttatctcttgacctggctcggttaagaaaagtcttcattcctcctcctgggggacagtaagggccatgatgactccctttccgggtaactttagctgtaaaagagctgtgctctgtaagagagatggtggctctcagcttgctaagcaagtcccttcccagcaagggcaaggagaagtcgggcatgtacaagaactggtggattacttcatgtacccctatagtacaagtgcagggcaagcagaaagcttgttttgccgagactcgtgtggcttcgattatatcaatagtctttttggataagggggtgaccggggtggttactactgaatattcagcaccagtatcgacaagaaactctatgtccttgtccctgactgtcatcctgaccatgggctcgttaggggcacctgagcctggtcccccttagtccagtagcccttctgccagattaaacaaggccctttcatccttgcctgagacctctggcttggagccattttgtttcttctttaactgggggcacttgtctttccagtcttagatcgtaaatgagctgccaagggaggggtttctcccgcagcttcacattctctcttgtctgttctgggtggtctaggggtgtatctgtccagaggaggcacaggtgctgtgggctcaggagtggggagtctctcttctaggtaaggacggggggcattgctgtgccatttcctgccatgggtcctctgacattgggtcagatagaactttaggagctgacttcccttggcgggtggggagagatccctcattggctatctgtccctttgccactaacactgctgctgcctgtcctctcaaccactgtggggggtctaaaaccagctgtaactaagtgtctgtgtacaggaacttgtctggataccctggcttacaggtaatcttgtgccatacctttgaaataagggacctatccaggcttccttctgatggccaacccacctctaatgctggccagtctgtctcacacaaagttctaagttttcctggtgttatagtaactccatagtctcccttaaatccctttttgaaattttttataacatagttcctagtggggtgggcttactttgtgtctgacccatttttctttcgagacaagacaacactcacactacaagagggaaagggtaaaggtcactcacgcgtggtggtacatgcctataatcccagctactcgggaggctgaggcaggagaatcgcttgaaccccggtggtgagccaatatcacgccattgtactccagcctgggcaacaagagtgaaactctgtctcaaaaaataaataaataaataaattgctttatggaagaaagtaagtatagatggagagaaagggatctgataaccgaagcagggaataaatgtttggagtccacagcatcctgagaacttcttgggaatagagtctaggcctccagtgctgtcactctcacccatcttcctctacacatgtgagatgtttcaggacccagtggcctttgaggatgtggctgtgaacttcacccaggaagagtggacattgctggatatttcccagaagaatctcttcagggaagtgatgctggaaactttcaggaacctgacctctataggtaaggatgacaatattccttccgtcagtgcattagcaaaccagtgtttctagctcatgaatgctgttgagtgattttgaacatagacaggaaataccttgatgaataaatgaggcatggctgcagtaaatcatgggcacagaatctaataattttttcacaattttatactgcttcaggactatttttctgtgtctgtattttaggaaaaaaatggagtgaccagaacattgaatatgagtaccaaaaccccagaagaagcttcaggtaatttgcatttccaagagaaagcagtgtctctctgcacaatcttagaatatgagaatatgttgaagagaagtaaaacaaagaactaaatccagcatcaaattcatttcttcttagaatattttctcaaaaaacatatatttaaacgtgactgaggctgagggctcactcctgtaatcccagtcctttgagaagtggagataggaggatagcttgaggccatcagttccagaacagcctgtgcaacataacgagaccacatatcaacaacagcaaaaaattagctgggcattgtggtgtgtatgcatcggtagtcccagctactcaggaggcgaaggcaggaggatcactcgagacttcaggagttaaaggctgcagtaagctatgatgatatcactgtactccagcatgggcaacaggacaagaactggactcaaaagaaaaatgacatacagtatttagtaattgtaaaatagtttacatgggaatactattaagaagccccttatgaatatttttttaaacaataggtatggctgggtcatcttgtagaacatgtccagtcaccttcaaacgattcagacagggcagaaagcctacactttgatggacagtgttaaaaatgcaagtgcaatacttgttgattaatatagaagtacttgtaaacaaacccttcatgatgtgtttctcatgttttacaggagtctcatagaagagaaagtcaatgaaattaaagaagacagtcattgtggagaaacttttacccaggttccagatgacagactgaacttccaggagaagaaagcttctcctgaagtaaaatcatgtgacagctttgtgtgtgcagaagttggcataggtaactcatcttttaatatgagcatcagaggtgacactggacacaaggcatatgagtatcaggaatatggaccaaagccatataagtgtcaacaacctaaaaataagaaagccttcaggtatcgcccatccattagaacacaagaaagggatcacactggagagaaaccctatgcttgtaaagtctgtggaaaaacctttattttccattcaagcattcgaagacacatggtaatgcacagtggggatggaacttataaatgtaaattttgtgggaaagccttccattctttcagtttatatcttatccatgaaagaactcacactggagagaaaccatatgaatgtaaacaatgtggtaaatcctttacttattctgctacccttcaaatacatgaaagaactcacactggggagaagccctatgaatgtagcaaatgtgataaagcatttcatagttctagttcctatcatagacatgaaagaagtcacatgggagagaagccttatcaatgcaaagaatgtggaaaagcatttgcatataccagttctcttcgtagacatgaaaggacccactctgggaaaaaaccgtatgaatgtaagcaatatggggaaggcttatcctatcttataagttttcaaacacacataagaatgaactctggagaaagaccttataaatgtaagatatgtgggaaaggcttttattctgccaagtcatttcaaacacatgaaaaaactcacactggagagaaacgctataaatgcaagcaatgtggtaaagccttcaatctttccagttcctttcgatatcatgaaaggattcacactggagagaaaccctatgagtgtaagcagtgtgggaaagccttcagatctgcctcacagcttcgagtgcacggtgggactcacactggagagaaaccctatgaatgtaaggaatgtgggaaagccttcagatctacctcacaccttcgagtgcatggtaggactcatactggagagaaaccctatgaatgtaaggaatgtgggaaagccttcagatatgtgaagcaccttcaaattcatgaaaggacagaaaaacacataagaatgccctctggagaaagaccttataaatgtagtatatgtgagaaaggcttttattctgccaagtcatttcaaacacatgaaaaaactcacactggagagaaaccctatgaatgcaaccaatgtggtaaagccttcagatgttgcaattcccttcgatatcatgaaaggactcacactggagagaaaccctatgagtgtaagcaatgtgggaaagccttcagatctgcctcacaccttcgaatgcatgaaaggactcacactggagagaaaccctatgagtgtaagcaatgtgggaaagccttcagttgtgcctcaaaccttcgaaagcatggtaggactcacactggagagaaaccctatgagtgtaagcaatgtgggaaagccttcagatctgcctcaaaccttcagatgcatgaaaggactcacactggagagaaaccctatgaatgtaaggaatgcgaaaaagcattctgtaaattctcttcttttcaaatacatgaaaggaagcacagaggagagaagccctatgaatgtaagcattgtgggaatggattcacatctgccaagattcttcaaatacatgcaagaacacacattggagagaaacactatgaatgtaaggaatgcggaaaagcattcaattatttttcttccttgcatatacacgcaaggactcatatgggagagaagccatatgaatgtaaggattgtgggaaagcattcagctagcctggttccttttatggacatgaatagactcacactggaaggaagcactatgaatgcaagcaatgtggcaaaactttcacattttccagttcttttcgatatcatgaaaggactcacactggggagaaaccctatcaatgtaagcagtgtgggaaagccttcattccttttacttcttttcaatgtcatgaaaggactcacacgggagagaaaccctatgagtgtattctagttccgtttgatatcatgaaaggacttacactggagtgaaaccctatgaatgtaagcaatgtgggaaagccttcagatgtgcctcgcaccttcaacggcatggaagggttcacacttgggagaaactctatgaatgtaagcagtatgggaaagccttcagatctgccaagattctttgaatacagataattaatgtaaacaattatcataagtatactaacatgttattctttttaaataagaaggtataataaaatatcccattggttttatgtattagatcaagcttataatgttacattgttattatttggacattgtgagtcagtattaccatgtggataaaatgccaggcatctttttcctcatggaaagtttactttttgcaccgggcacagtggctcacgcctgtaatcccagcactttgggaggccaaggcaggcggatcacgaggtgaagagatcaagaccattctgaccaacgtggtgaaaccctgtctctactaaaaatacaaaaattagctgggcatggtggcgcgcaccggtagtcccagcttctcgggaggctgaggcaggagaatcgcttgaacctgggaggcggaggttgcagtgagcagagatcacaccactgcactccagcctggcaacagagcaagactccatctccaaaaaaaaaaaaaaaaaagaaagaaattttacttttcatgcttatgtacttattttttatctcaaccctaattttgctggtttttgttttttttttttctgatagtctcattctgtcgcccaggatagagtgcagtggcgcagtctcagctcactgccacctccgcctcctaggttcaagtgattctcctgcttcagcctcctgagtagctgggactacaggcgtgccccacctcacccagctagtattcgtatttttttagtagagatgggatttcaccatattagccagactggtctcaaactccggacctcgtgatctgcccacctcggcttcctaaagtactgggattacagacatgagccactgggcccggcctcaaccctaatttttcattcactcattatgccaaaagttatctcatatacctctgagtgccttcttccccaaaaccaccagtgccatacctgctgtcagcaagggtgtaatatactgtagtggtaaatatgaccacaagtcataaatgactgtgggatgtatgagaattacaagtcacattagtaagaagagaaaaattttggtcatgtttatgatttgaaatatgttttcttttatcacatttagaaatatagttataaaatattctctttttttgtcctgatccatcatggtcactgaggagcatcgtctcatatgcccggtatgtgacttgtgtctctccaatggtaaaagccttggccttggccagacactgtggctcacgcctgtaatcacagcacattgggaggctgaggcaggcggatcacctgaggtcaatactttgagaccagcctgaccaatatgatgaaaccccatctctactaaaattacaaaaattagccaggtgtggttgcatgctcctgtaatcctagctagtcaggaggctgagacaggagaatcgcttgaatctcgggggagggcagaggttgcagtgagccaagatggcgccattgcactcctgcatgggcaacaagagtgaaactccatctcaaaaaaaaagacttggccttgtgatgaggggaggtcagctctagactcttggaccgggttttgccttacttattctctaaagactaaaatatttcctaaaatgtatgggcactgtttactagaaagtaccttagttaaaacatacaaattcatttatgccttataaagctatattttttcaaattgttttactaagtcataggaagctaatacagttgtgtaaattgtctgaatacaagcctttctttctctgataatgtgctgttgatgctaacttgtcaacagcctgcttatctcagcagtgtaaagttaacagcaacgtggaaaagtaacttttatatattatgcaatggcatagaacaattcagtcacttcccttaaggtaccaatgaagctgctcttcagaaacccttatttaaaaaacactgtcaaaatccaggcaccaaaggatgcagcatcaatcattgaccaaaccctatctgtgtgtggagatgacatacccagtctcagataatgcatcctcatcagtgaagggtggagtcattgattgtcagatcacacaaagtgactcacagcagggaagacagggcagtggcagagatgggggcacctgaccaggtgcagtggctcacacctgtaatcccagcactttgggaggctgaggcaggtggatcacttgaggtcaggagttgaagaccagcctggccaacatggtgaaaccccatctctactaaaaatacaaaaattagctgggcatcgtggtgtgtgcctgtaatcgcagctactcaggaggctgagacaggagaatcacttgagcctgggaggcagatgttacactgaactgagatcacgccactgcactctctagcctgatcaacagagcgagactccatcacacacacacaaaaaaaattaaaaaagagttgggtgcacctggatctaacccctgtctcatccttctgccttgaaggccaaatgcaccctgatacttttcaccaaagagtagaaacaccaccatccacttgaccccaaatgtgactttccacaggatgcaagcacagtgttggaatagccaaagacagtaacaatagaagtgcagggtgagggtgatgaacaggacacactggagagcctgacattggcctagactacgggggtgtcttgatccttcacaaagagcccaaggagcaacccaaagagacactggagcacaggcccaaagggtgttcatatgccaggaaggccactaattttagaaggcagtgatgttggttcctgttggagtcctgatcctttataacatatgcttttctgcatctggttagacaaggaaatctgcaatttttgacttgcagcatttagaaataagttattttagcaatccacacactcgtggtttattctgaactaacttgagacaaacagctacagatagggaatatcatgagtatttccaagactaaaactcttcacaaagtcagtgggaccctctcatgggagggttttaagacccacaataaaaaaggtggggaaacattgagtggaaagagggcagcaggtcaggggccttccccagaggcctaacacacccaacattaccctggatgaaaacaaatacataccataacatcacactttcttcaatgtgtaacagagaaaatgaaatgtattcaaaggtaagctttcagaattccactttacacaattaataaggttttaatattactctgtgttgatgttaaggaattattaaatatgaacagcattttctggttatatatggaaaataccttgatttatgaggtatgaaaatgctcatttttacgtatgcatgttttacttttgtgctttttttataaaacaaggtgaaaaaacaggaaaaaaatttcagatcaaggaagttaagcagattaataggagaaaagttatacaaatttatttaacatgtatatatgggagccttcagaatgaagacccacccaacaataagacaaaaacttatataccattccagggtaggaaagaatgcagatgtggcatggccaaaaaatcccaggtttgatgggtaagtcaagtttaatagcaagacagattctgcaagaggaaaggaagaagcttggctagcaaagcagacctttttatgcagatgaaggctccctcagagagaataggtgggaaattctgcttttcattcagactttcatttagaattttaagtaatagagtcaggattatgctatgttgcttgggttgctctctaattgtttgtctcaagcagtcctcccagctcagcctcccaaagtgctgggattcgaggcatgagccaccatgcccagacaaggtttgtctccttataaagaattattcattgctgggcacagtggctcacatctgtaatcccaacaatttgggaggccaaggcaggaggatcacttgagcccaggagctcaagaccagccacagcaacatgacgattccctctctctacaaaaaatacaaaaaattagctggatgtggtggcacataccatatccaggaggctgaggcagaaggagaaccaaagcctgggaggttgatgctgcagtgagctgtgattgtgcccctgcactccagcctgggtaattgagtgagggcctttgttaaaaaacaaaaaacaaaaaaaattgttcacttattgcagcttcagattttttttaatgaattgtaaattgcattttcattacaattggaaagataagaaaattttgcacagagcccagataaagacagatttcagaaaaatatcatttgtcttatatagagtttgtttcaaaaaaatttttttttttttttttttttttttgagacaaagctttactcttgttgcccaggctggaatgcaatggctcaatcttggctcactgcaacttctgcctcccaggttcaagtgattctcctgcctcagcctcctgagtagctgggactacaggcgcataccaccatgcctggctaatttttgtatttttagtagagactggatttcaccatattgggtaagctggtctcaaattcctgaccttgtgatccgcccacctcggcatccgaaaatgctgggatacaggcgtgagataccgtgcccagcctgaaaattcttgtttaatttttttcttccttagaggccgtgtagtacatttcttggtctatcctttttcgtggatgatttctttttctttctttctttttttttttttttgagacaaggtctggctctggtgcccaggctggaatgcagtggcacaatctcagctcactgcagccttcatcttccaggcttaagctatccttccacctcagcctccctaatagctgagaccacaggtgcacgccaccatgcccaaagtgctgggattacaggtgtgagccaccgtgcctggccatttatgcatcatttctaacagtttcagggcttagctttgggaatgctgcttgggaaaagaaatagggaaaatcttttattacagctggagaaaaggaataaacttctacaacaaagtatagtagataatcagtgaattacaaagattcggaaaaatatcagtcctcctttgcaggttggagaacttgtaacggtggataactcttctcttcctgttatctgtggggtaagacctggctggcaactgttgtgatatgtttatattcacatatggttaatgtgtagtatgtgctttgttatggaaatcataatgaagtaataatgtccaccttaataagataataaaattcagataatatgattaaatattgagtttatgtgaacacaaagtttgagggtagccactggggaaacacatcctgaagagtggggtcactgctcccactcttaactggagaagttaagtcttcacttctgtagggcaaaatgaagatgcttaatagggttacattttccatacaaagccaatgcatatatttcaatgatttcattggttgccgcttgccaaattgcagcttaccaaatttcaaggatgattgctttaactttttgtaaggaggggtagtggtatcaaaaggatcctacctctggcacttctcagtgttttctaatgacttatagcccaagaacaaggaagagagttaatctttttgacatgcacacggaaggagcaattacatggtagcgtaaacacatttctcaatatgtttattgagtgaaagggttagatactttccctgatgaggggtgataggtaagtgccttataatttccttccagcctataataaaccgagtttgagagattttgccggattcttcaaacactgggtattttctcattgaaacagaggcctgagtccagtgactgcaaactaaagccagtgagaaacctacaaagagaggtcattgaaagctcacaccaggcgcagtggctcacacctgtaatcccagcactttgggaggccaaggcagatggagcatctcaggtaaggagtttgataccaacctggccaaaatggcgaaaccccatctctactaaaaatacaaaaattagccaggtgtaggggctcaagcctgtaatctcagccattcgggaggctgaggcatgagaactgcttgaactcggggcggaggctgcagtgagccaagatcacaccattgcacttcagattggatgactgagcaagactctccaaaaaaataaataaagctcacctggttcttcccatggtgctcccactgcaggtgttttcagctgctcaaattgaccatgggaggagcgctttatactgacagaacctcagatccctggaaagctagggatccacaggcagatacagtactcagtgatgccctccgcaagtgacagtttttgtcatggagcttttcctagacgtttctagtgaaacaaatgtaggtttcagtaagaaataagttttttttttttttttttgagatggggtctcgctctgtcgcccaggctggagtgcagtggcacgatctcagctcactgcaacctccacctcccggtttcatgccattctcctacctcagcctcccgagtagctgggactacaggcgcccgccaccatgcccagttaattttttctattttttttagtagagatggggtttcaccatgttagccaggatgatctcaatctcctgacctcgtgatctgcctgcttcggcctcccaaagtgctgggattacaggcgtgagccaccgtgctcagccaagaagtaacttttaattaccttaatgaccctgaaatcagcttgtcattaggagaggtcataaaaagagtctaggtactgaacttgcaagtaaaaataaaaatattaaataaatacataaagtggggttgcatataagcctagaagggatcagtcaaaaattcaggggtggctgggtgtggtggctcatgcctgtaatcccagcactttgggaggctgagatgggcagatcacttgagatcaggagttcaagaccaccctggccagcatggtgaaacaccatctctatgaaaaatataaaaattagctgggtgtggtggcacacacctgtaacaccagctagtctggtgactgaggcatgagaatcacttgaaccagggaggcggaggttgcagtgagccaagatcatgctactgcactccagcctgggctacagaacaagactgtctcaaaaaaagaaaaaagttcagggacctggaggaaggagagaaactgaagcatgctttggtagatagatatttcattttgactaaagatcactaaagagaaaactgttcacctaatggtttgtgaggtaaatactggaatatctagtgggtgtctggtttgtcataggtaacaaacgtggcaccatctaattcaccatgggaagcttgtttcattgtagtaaggtgctcttgcacaacacaaaggatgggggatttcatgaatcacagccattttcaggattgcccacccacccccatctcctttccacaccccttactctttttctatccatgtctctgatttgactcgtcctgagttgtatccttcatagtaagtgggtaaatataagtgaactgtgggtagttctatcaaattatggaacttgagtaaggtgttgtacaggacccaggtctagatgcagttgctgagaagtacaggtggcccctagggctttgagtggcatctgctgagtggggctgtgttgggtgagccaggaactcatggagtctctgctaactctgggtggcttctgaattgagtggttgcatgactgcttagtgctggagaattcgctggtgttcagcaagcaccacacatctggtgtcagaaacaaaagacaccataggtcagaaccttccactgactcacagtgagcgagtggtctttggtgggcattgagaccccggtggaaggactgtgtccacactgtggggaggggctacaagggtgttagtagaagtcccagaattaattttctggctgctcacatttccctcacacactgcctaggagtgggccagcctggcctgtgtctccacagtccaagtggttcctaagcttgggaatgtgtaactattggagtgtgggtttccttgtgagctgtgggtgaggcaggctgcctacctgagctgcctccgttttgtttcttttatagaatcttgctaccatggaattgctctttctgcatgcatcagatcattcattcgtttgtttgctcatttatttatttatttatttttcaaacagaatctcactctgtcgcccaggctagagtgcagtggcgtgatctcggctcactgcaacctctgcctcccaggttcaagcgattctctttgctcagcctcccaagttgctgggactacaggcacatgacaccacaccttgctcatttttgtgtgtgtttttagtagtgacagggtttcaccatgttgaccaggctggtctcaaagtcctgacctcaagtgatccacctgcctcagcctcccaaagttctgggatttcaggcatgagccattgcacctggccacatctgagaattttgttttatgatttgggtgttaggattttaattagctggttggaaccttaatgagtagtttggtaacctttgcagaaggaaatagttttttaataagctgttttatgccaagtcaaaataataacaatatgaatactcagacacataccaccccaaaaaataaataggccttgggcagttctggtgtgtctccttggtctcacttatttttgatatgcaaaggtgatcaaagttttgattctttttgttattctttgtatctttgtcatctctttgtcacaaagcagaattttcccacttttgaattctcagtaacataatgttaccattaatacaccattagtattatgctgagagggtgtgtttctgggttttttgcctgagcctgttgtagacatgctgctctgtgaagttgtgggtcatgtaattgattctcttatttcgctgcttaatgggacttgagttggttcaagtctatcttttgatcttattgatagtactcttcttgtttttgtccctaattggaaataattgctggcttgtagattatggataaattcaaatttactatgaaatgtcgatagagtatgaatgtaacttctgaattaaccatctcacctttcatgcacgtgtctttattcttgtgatttgtcaacactttgaattatctaactcactttttgttgcccatctactcttaagtagaatctctgtaagattatgtattttttcactggttgccattggttgagcatttttcctatatgatctttcatcttctgtgttgcagttcccagtcatcctcttacatttgactaatttgtagtgttttttttttcttttttttttttttagacaagagtttggctctgttgtccaggctggagttcagtggcgtgatctcacctcactgcaacctctgcctcctaggttcaaataattctcgtgccttagcgtcccggggcgcataccaccacccccagctaatttttgtatttttagtagagatggggtttcaccatgttggccaggatggtctcaatctcttgaactcgtgatctgcccgccttggcctcccaaagtgctgggattacaggcgtgcgccactgcgcccgtctcttgttttcttgtttttaatttgagacaaccttgctctgtagcccagctggagtgcagtggtgtggccactcactgcccactgcagcattaagctcctaggcttgagcaatcctctcacctcagctttctgcccagataatttttaaaagttttttgtagagacaggggtctcagtgttttgcccaggctggtctcaaactcctgggctcaatgaatcctcctgccttcgcctcccaaggtgctaggattgcagacatgatccaccacgctcagcaatgagcggtttttttttttttttaaaccaagatatctgtacatgtttctgacaaatattttatttaaaatctttaacaactgcatactaaccaaggttattctgtttttcattttcattatgactacttgtttttctttcttattctcattttttacctaattaaaataatttaccatgtagtggccctggcatgcattttgctccttcatacagtcatacagctacctcgatgtcccttctttctgccattctgaaattggacctcattccttgactcttgctccccatctgctatgtgataaagtcctgtctgattacattgtctccaaagcctcttttatagacttccatttgccccttggcatgtcttgcatttactctcctcgaaatatatacttagaggccaggtgtggtgactcacacctgtaatcccagcactttgggaggccgaggcaggaggatcccttgagcccaggaatttaaaaccagccagcgccacagagggagaccctgtcttaaaaacaaaatttatatgtacaagccctaaaccccaacacggtcatatttggacacgacgaaccttttaggatatcacataacatttataaaagagggccctcataatgggattagtgagagagagagagaactctgtctctccaacatgtgaggacaaagcaagaaggcatctagctgcaagccaggaagatagccttcactaggaacaaaattgctggcagcaagattttggattccccaagctccagaactgtgagaaacaaatttctgctgtttaagaaactgagtccatggtgttttgttatactagcctgagctaagtcaccccaagagtcctcacattaaccatatactgtcatacaagtgctgcatttggatctacctggaatgtctccaaattttctgcttttcctcttggacccattgtgagaataggtttgcttcacaggaaactgctggtaatagtagtgatagcctaacagctagggacaaaaaggaaactttctttttctttttctgagatggagtttgtgctctgttgcctaggctggagtacaatggcgcgatctcaactctctgcaacttctgcctcctgagttcaagggattctcctgcctcagcctccagagtagctgggattacaggtgcgtgccaccacatctggataatttttgtattgttagttagagatggggtttcaccatgttggccaggctggtctcgaactcttgacctcaggtgatccacctgcctcggctttccaaagtgctaggattataggcgtgaaccaccacgcttggcctcttttacacacacacacacacacacacacacacacacacacatatatattgttttcttttttaaataaaaataaatagaaactaggtctcactatgttgcccagggtggtcatagcccaagattttggtctccagcgatctatctgccttggccaccccagtgctgggattaaggcgtaagaaactgtgctcggccaaatgaacgaaacttagtgggaggacgggcgtggtggctcacacctgtaatcccagcacttgggaggctgaggggggtggatcacctgagctcaggagttcaagaccagcctggacaacatggtgaaacgctgtctctactaaaaatacaaaaaattagccgggcatgatactcccactctcatagtgagagaaagattctttcttaaggattctacctgctggaaagcattatatactgccagcacttgttcaatacaagactttctggtttcatctccatgtcctgtttcccaggctggagtgcagtggtgggatcatagctcactgcagaaactcctgggctcaagggatcctcctgccttagcctcccaagtagctgggaataaaggcacatgccaacatgcccgactgtttttaaatttttttgtacatatggagtctcactatattgcccaggctgttcttgaactcccaggctcaagtgacccccccccacctcagcctcccaaagtgctgagattacagtcatggaccaatactcccagccctgaaacagatatatttcaaagggagaacatctaatgttcaagttggtatctatagagcagttaaccggaactatcatttagggtctgtgggattctaggacactaggtatgaaacaaatatgaggaaggtcagagaacaagctgacttaatgattaatgctgaaggtgctgcaagcttggtttaagttttcctcctcccatcctccctgatgaatttgataaagtttaaagggatggtttcaccaggggctttttccattgactgcaaggaggtcatcctgcctggtaaatcctcagtaggccaagcctcttatgtggcggaatgatccagtcgatgaggaaatatcaccacctgttatgttttacaattagaccatccaagggggtcagggtttccccaggtagtttggtgagagagagagagagtgtgtgtgtgtgtgtgtgtgtgtgtgtgttttgagacagtgtcttgctgaagtgcagtagcctgatcatagctcacagcagcctcaaactttgaggctcaagtgatcctcctgcctcagcctcctgactagctgagactataggtacacaccacctctccaggctaattctaaacaaagatgtatggagttgggagggtctcacttcactgctcagggtgatctccaacttctgtcttcaagtgctcctcccactttggcctcccaaaatgttgggattacaggcgtgagccatggtatccggcctcccaggctgttgttgaaaggtttttgcaatctctcagagttatgcagcagtttattccctcacagtgatactctcatcctttgaccccattttgcagcagtggttgagcgttcacttttctttccataagggggtgagcttgccggtgactctcttccccctcctcatcaatgacttctttgtcatcagagccttcctcttcataaattcccacggaatccaagttttcacgtcccaatcgggcttagttatgatagccacaggcccacaccagctgccacagcacccccgtcccatggaaaccgcccgactctcttctccccaagcgtcctgtcccgggagcccccatctctgctctcccgggctccgggccctagatccgcgctgctgtagagcccagttcccagagtagctccctccacctgtccacatccagctccagctctccaccctctctccaggcctggagttgctgcagtgtcactgatcaggggaccctcagctgccacctccaccgcgatctgaaagtcttttaaatgcacttaagttatcttagaattttcctcgcccattttatacataaacataggaggagagcaggggtttgagggtgtttgtctcatggaactgatcagtcgggtgagaagtagctgaataacctgcagggggcagcagagccccaggccagtgactccacgccgaggccagtgtggatcctgcaaaggaagagaaagagagattccctggggtcttcccgggcagcccgccctcccctacaagtggcctccagccgctcagagcagctccagaaggagtgtggattccgagaagctgcagagccctggaaagcagaagagacgtgcagacgcctttgtggggttctgtcctttctggtgttgtacctctggagcctggggctgtcttctgggcagggtttggggtttgacacgcatggggtcgctggaggcagagttgtttgtatatataaagagaatgtgtgaatatcaggctagagacagaattgtttgggggcgacacctggataaagggttcatgaagttgacagtttatttaggtcagaaggttaaattaaccccaggtgagagtttcctgctggtgaaaatgaagatctggaagcagggagcattttcacactgtgaggaggggatgggggtgtgtgagcaaggcttggccatgcctcattcccaattccggcccgctcaaggacatgtgcctctcctgatgcagtcgtgcctggcctggtctcggttcccctgctgctctgaggccagcagatggctcctatggacactgagtctgaaattccctgcacactcctgtgaccccgtgcagaacgaaggagcggggaaaatcccttgagtgaggaagacgctagtgttctcttatatctgtagcaagtctggctgaaatgcaaatatccaataatcagagtacaggaagcacctcgcccttagagaagctgtggctagaatccgtcaagtcagtctggctctgccgggcctgatacccaaggcttccgctgtcactcagaagtgaggggcggggcctagcattccatccaatcagaggtgccggggcagggccctgcccattgtttatccaggcacagagtgggtcgcattcctgtcctcacctttgtccttgcgcagccggtggttgatatccgctgtatccatccccgagagggacctggtacctctacccaggtttctatcgctctgtctcctgcgctgtgcccttctgtagtcacaggagctgtagagaggaccccaggacatctgaaagccaggaaatggtgcgtgtgcatagccggttgtcccgagacggggtagaggctgcctggaaccggccggaaccggctgcggcgggacccgggcctccctgcgggcgactccagggtctgggaccgagtcctcctggagctgctcggccctcggtcccctcggccgctggatggggctgggctggcagccgggaccccgggtgtcctgtcctgtccctgcgcggtgactgcggccccgccccggagccctctctgggcagttccgcgcccgcagccccgcgtctccccagattatgcggaagccacgagagggtcatgggggaaatcctgactcgtgtgtagggttcgtgcgtgggaggagcagtggtctgtggggcccccagttcccactttctcctgttaaaaattaaactgaagtacattaacaattaaagagttcatttgagcaaacagcaattcagtaatgagaaccacccagtcctggcttgtggtttgtcaactgaaaaagccaaacaatgtaaaataaagtttattcgtagccaaataggagagaccttggcaagggaaacacaaccccaagaagcctatagtgagtggtcccgaggcggctcaagacaatttggttttattcatttcagagagacaggaattgcagggaaaatcatgaatcagtgcctggaaggtgtaagttccattggcagaaagggcgggacctgtggaaggggggttagaaggcacaggtggttgagggattctgtaggtggcagttgattgagagtgtgaagtttgtctaaagtttggaggaggtaggaaggaatgctgaaggaagggggtctgttatctgccacttgattccatcccagccaaaaaacagacctgtttctcgagattttatgaattccaaggcatgacttacccttaccttgcgtggccttaggtcttgtttgtaatttggtatcttcttgccacaaggagtctgtttttccagtcagataatgtctgtttttacatgaatgtgcgtcagttgctgcatgtaaactcctaaagggagagggtataaggagacctgtctcacctgccatcctgtcatacagaggcactcaattttcagggttttttgggggttcccttggccaagagccagtcacttcacttaactgggaaggtactttgtttgtttttgtttttgtttgagacagaatctccttctgtcgcccaggctggagtgcaatggctggatctcggctcacagcagcctttgccttctgggttcaagcaattctcctgcctcagcttcctgagtagctgggattacagacatgcaccaccatgcctggctaatttttgtatttttagtaaagattgggcttcaccatgttggccaggctattctcaaactcctgacctcaagtgatccacctgcctcggcctcccagtgtgcggggattacagatgtgagccacctcgcctggccgcaaggtatgtttttaagtttgcaggttgaagactgggcttttataaggtacatgaggagacaaatgagataaatgcttgattggttgcagagatgcagttgccttatttggacttgtcactccgaaataatcgaaaggttcagatttcagctggaagagtttattcaagcagaaagatagcaatggcccaaacaggaaaaacacagactctagagaaaaggactcagtcctccaaaattggaagttaagttctggctttatattaccaggaaaagaggtcctcatcagaccccaagagggttcttggatctcacacaggaaggaattcaagacaagtcgcaatgtacagtgtgtagagagtttattgaaagctactctgggccagcatgatggcttaggcctgtaattcaagcacttttcaaggccaaggcgggaggatcacttgaggtcaagagttcgagaccaccctgggcaacatagcgaaacctcttctcttccaaaaataacaaaaattaactgggtgtggtggcctgtgcctgtagtcgcaggtacttgggaggcttaagtgggagaatcacttgaacccaggaggcagaagttgcagcccagccgaggactcgccactgcactccagtgtgggtaacagagtgagaccccatctcaaaaaacaaaaacaaaataaacaagaaagagttgaagaccaacctggctaacacagcaagaccctgtctctattttgtttttttttgagacggagtctcgctctgttgcccaggctggagtgcagtggcgcgatctcggctcactgcaagctccacctcccgggttcacgccattctcctgcctcagcctcccgagtagctggactacaggcacccgccaccacgctcggctaattttttgtatttttagtagagacggggtttcaccgtgttagccaggatggtctcaatctcctgacctcgtgatccacccacctcggcctcccaaagtgctgggattacaggcgtgagccaccatgtccggcccctgtctctatttttaaaaaaagaaaaaagaaaaagaaggaatgttctctgttacagagtagggcatcctcataaagcaagtggaggaacatactgtctaagtttttgttatgtaggggtcttgtctatgtaaagactaaactaagctgtgcctacgtgcatgtgggctgacagcgtcacaaaatttattactctgttgatttaaagaaaactatcctttaccttttagcacacaagtgcattaaaacataactataattatcttgaaagcacatactattatgagtattgggacatccggatgttctgtcgttgtgggagtgtaaggatacttgcaggcatcttcaggctgttttcttaatgtcaaacatgttatgaccatgggttgtgactggcaaggagtgtttcttgttagtctcaagatggagctgattggtctttctctggctcccctaggcacttgcttccctaacacttatataggcaaaaggcaaataaatgtaacaggattacattttccatagaaggctgatgtatgaggtacaataatttaatttttttttttctttgagacaatgtctagctctgtggcccaggctggagcagtggtgcgatcatggcttactgcagccttgacctccccagctcaagcacctcagccttcccagtagctgagagtacagttgcccaccagcacacctggctaattttttgtattttacagaggtggggtctcgatatgttgctcaggctggtctcttgctcctggcctcaaacagtcctccttccttggcctccaaaagtgctgggattatagacatgagcaaatgcatgtggataacaacttaatttgtagtggtttgcttttttcccccagagcttgttttcttttctttctagctggtttatatttccttttcaatttaaaaaagtgaatttaatattctagctgaagacaacatgatagccatggagtctttgtgtgagaaagttaagagggaaattagtgtactatagagatcagtagtagagaggggcctggcgggatggctcacacctgtaaccccagcacgttgggaggccgaggcaggtggatggcttgatctcaggagttgaagaccagcctggcaacatagtgagaccccatctcaattgtgaaaaatcatattaaatttaaaaagacagtgacaagggaaagggtctttcctgtttcccttcagtcatttacaacattttacaaaacactataggtaagaaagaaggcaaatctgtaatcagggaaaggagggttccagctagctaggtgaaagttgtgtgtcatgtgactcaaccccatgatcacattgcttcaagatgatgtagagattcatcagcttaaatttttgaattacttggttgtttttgcttgtttgtttgttttgagacagggtctcactctgtcggctaggctggagtgcagcggcgtgatctcagctcactgcagcctctgccttctgggttcaagtaattctctggcctcagcctttccagtagctgggattacaggtgcgtgccaccacactcggctaatttttctatttttagtaaagacagcgttttatcacgttcgccaggctggtcttgaacttctgtcctcaagtggtccatccaccttggcctcccaaagtggtgggattacaggtgggagtcactgcaccgggcctgacttacttgttcacacagcctatataggtagaaaatttctagttatgtaatcagcggttaattggtggattgtgcctgattaagcataaatttcatttccctatacattagtaattttcacgagttgtatttaaatatgatttcaggatccttaggtaggaccttaggacacctcacacagtttggcctcattgcttcttatttaaattttttcacattctccagggcaactggtttccccttacattttccaaatatatgggatgcagcgtctcaaatcctccaccctcataccacagcctaactcttcaagggcttgcagtgaaatctgtttctgaacatttcacatgagaggaaagcagagaataaccactagacatttgcctgaaaaatcctttctgcctctcctccttttatctttcctagacacagacaccttatcaggatgtctttgggatgaggttcctttctggaaactttacagggtgatgtgtcttcagtacaccctcctatcttttcctggttttgggttttagaattgcctggggctggctcaagatccccacaactgccatgtctcctggagggtctcatgggtattagtgccttaggggagtgggacctcccgagggagcagctgaatgccttatggtggaggagatgcctggtatactcttcatctacataaccaattcttggggtgctcagcttctgtctcccaactccactttccattaattggagacacatggctgttctgccaatcggatgttgctaatgaggaaaaacagagatgattcctgtcctctggattgtctcaactgtgaagagagaaatatcccaaaagacaaggaaaggccactccaacaaggatgtatttagctgtcccacagggaggtggtcaccagaatgcagctgagtaagtcccatatgtgagttaaccacatggaggaactgggaggaggtggagaaccagaaactgttcagagtttgagtaaagttttcttctgttataacaacgttaaatccataaagaaaatgcatgctaaggtaacatataaataaaagaattcactgtaacaggtaactctagaattaattaaattattgtatatggagatgatgagtagtagattgattattctcctgtagataaccatttgtccctgctttttctgttaagtgttcaccacttgtatcattggctggcaatacctggtttgtcatagtttcatattaccttaaatagatgtccagagcaggtgcagtggctcacacactttgggaggctgaggctggcagatcacctaaggtcaggagtttgagaccagcctgaccaatatagtgaaaccccatctgtactgaaaatacagcattagctgagcatggcagcgcatggctataatcctagctacctgggaggctgaggcaggagaatcgcttgaacctgggaggtggaggttgcagtgagccgagatcccgcctttgccctccagcctgggcaaggagagtgaaacctcatttcaaaaaataaaaaaaaaactaaaaaactagatgccctggtctcacaatttgctgttttccattggtctgtccttccatctctctgttaataccattttctcttaattagtgtagagttcaaagctgcagtgtatagtagggatattgcttctctatcttagtcatcttgggctgctacatcaaattaccatagactgggtaacttaaagaataaacatttgtttctgacagttcttgaggttgtgaagtccatgttcagggagttggcagatctagtgtctggtaatggcccgcttcctggtttgcagatggtcatcttgtggtttcttcacatgacagaaaagagaggaagctggctgtcctgtgtcttcctataagagcactaatctcattcggaaagcatctacctttatgctctcatctaatcctaattaattcccagagatgtcaacttctaatactatagtggggggtaggttattaatgtgtgatttttttagagtgatgcaaatattcatgccgtaacaccctccaaccatattctatagagcatcttggctgttcttagtcattgtcttctatttcagtttttagaagtacttttttcttaattttagtgaaaaaaacaaactgccttataaatttcatggaataaaatataactgtagtcgtatttcaaagaggttacatcatagtgttatttaatctccttttaaggacacatgacatttttccatttattgcattttatattgatgtttttcagtgtagactttttgcataataatcattttatatccttcctgagacttttttgggcttcaagaaaattagttttaatagaaatttgtggccgggcgcggtggctcacgcctctaatcccaacactttgggaggccaatgtggatggatagcctcagttcaggagtttgagaccagcctgacaaacgtggaggtttccatgtctactaaaaatacaaaattagccaggcgtggtggcagaggcctgtaatcccagctactcaggaggatgaggcaggagaatcgcttgaacccaggagacagagattgcagtgagccaagatggtgtcattgcactccagcccaggcaacaagagcaaaactttgtctcaaaaaaaaaaaaaagaaaagaaaagaaattagtccagcctgggtaacgtggcaaactttgtcaatacaaaaacatacctggtcatggtgatgtgtacctgtagtcccagctactcaggaggctgaggtagaaggatctgttgagcctaggagtttgaggctgcagtgagctatgattgcaccaccacactccagcctgggcaacagaatgagcctgagaccctgtttcagaaaaaaaaagggaagaaaagaaaaaagaaaaaaatgagtttcaatagagtatgttgtcttttaaaaattacattcaacaggttgtggctgataattgaaattcactgagatttatttttgtataaagtgtgcattctagaaacttagtaaaaatattacatatgcacaaaatacataaaagaattgcacaatgaatccaaataatgatggagccagtattgggaataagataattgccttactttttatactttcacaacctgggtatgcatccccatcagtatattttatttttgcacattttttatgcaaatgataaccaatgtgtgatattttatattggattttaactcagttatgaaccttacatggaatgatagttaattcactttcttatttcattgattttattatttagaacagtggttgtttgcccaaaacgttgagcaaataatccacagagttcccacatttttcttccaagctcataattccccctgttttaaacatcttgactggccagatgctgtgcctcatacctgtaatcctaccacttagggaggctgaagcaagaggacagcttgaactgcagtgttggagttcagcctaggcaacataacaagaccctgtttcaaaaaaaaaaaaaatcattttaaaccatattgactgtgtgtagtatatcccacaattgatgcaagaatatattacatgtgaacacgatggaaattgaagaaaccaatattattattacctaaagtccatcttttacattaaacttcactctttttgttctgtggtttaagacaactacatgtgtcttgtatccaccatcacagtcttatacagaaacgtttcactgccttcaaaatcccctgtgctcctcctaattctatctctcccctccctcttttgccacccctatttatccctggcaacagatgatgatgttccttcctctagagttttgcattttccagaatatcacatatttggaatgatgctgtaagtggccatttcagacttgcttctttcatgtaaaaatatgccttgaaggtctctcgatacctttgttgcttgacgactcatttattttttatttttatttatctaaaaaaattttgttttgtgagagacagggtctcaaactcctcagctcaggtgattctcccacctcagcttcccagagtgctgggattcctcttgtgagccaccacgttcggccactcattttctttcatcactaacattccattctatgggtgttaccatagtttgtttctttattcacctattgaaaggctcatcctgagcctggtgtgatgcctcatccctgaattcccagcatatgggagactgaagtgagaagattgcttgaggccatcagttagagaccagcctggtagatacagtgtgagaccttgttaattttttttttttttttttaaagactcaccttgtttgattctagtttttggcagttatgagtaaggctgctaaaaatgtttgtgggaggacttttgtgtgaacatcagtgttcagttcatttaggttaatatgtaggattgagactactgaatcagtaagaccatgcttattttcttcagagctccacagactgtcttccaaattggctgtagaattttccattcacatccatagtgaaggagagttcactgtctccagcatttggaagtgtcagtgtttgggatttaggctaccccaccaggtgtttgctggtgcctcattgttttctttctttctttctttccttctttcttttctttctttctttctttctttctttctttctttctttctttctttctttctttcttttctttctttctttctttctttctttctttccttccttccttccttccttctttctttctttctttctctctttttttttgttttttgttttgtgtctagttcttgttacctaggctggagtgcaatggcatgatctcagctcactgctgcctctgcctcccaggttgaagcaattctcctgactcagcctcccaagtagctgggattacaggcgtggtcctccactcctgataaatttttgtattattagtagagatgacattttaccatgttggccggggtggtctcaaatttctgacctcaggtgatccacccgccttggcctcccaaaatgctcaattataggtgtgagccactgcccctggcctgttttaatttactctttaataacatgcaatgttgagcatcccgtcatatgtttgtttgacataattacattctttagggggaggtatagttggaaatattttgcctttttttgggcgggggggtggggtgtaatctggctctgtcgcccaggctggagtgcgggggcatgatctcagctcactgcaacttccacctcccagattcaaacaattctcccacctcagcctcccaggtaactgggactacaggcacatgccaccacacctagctaatttttgtatttttagtagaaatggagttacaccatgttggccaggctgatcttaaactgctgacctcaagtgatacgcctgccttggccttgcaaggtgctgggattacaggcatgagccaccacacctggctgctaccatgattgattttcattacttactgtgaaacaaaacttaaaacctatcagcttaaggaattttacatgtacagttgagatagttggagaaatctacataagttctctaagatgaattctattgtgttctgccttttgcaattatcctgatgtttcttgcatgtcatagtacgggccaagatgttattttcttttttttttttctcgttgagactgagtgttactgttgttgcccaggctggagtgcaatggtggaatgtcagctcaccacaacctccgcctcccgggttcaagcgattctcctgcctcagttctcctgagtagctgagataaaacgcatgtttagtaaagatggggtttctccatgttggtcaggctggtctcgaactcccaacctcagatgatttccgccccacccacaccccccaaagttctgggattacaggtgtgagccactgcacccggccaagatgttattgatttttttttttattttattattattttttgagacagagtcttgctctgtcgcccaggctggactgcagtggcgcaatctcggctcactgcaagttccgcttcccgggttcacgccattctcctgcctcagcctcccgagtagctgagactacaggcgcccgccaccgcgtccagccaatttttcgtatttttagtagagacagggtttcactgtgtcgatctcctgacctcgtgatccgcccgcctcggcctaccaaagtgttgggattacaggcgtgagccaccgcaccccggcctttaagatgttactttctaagactaaataatatcccattgtatgtgtatgcttactacattttgtttatccattcagtcatcagtggatatgtgggtggctgcactgctcattactgccaccccaggaaggttgtatagtggttaaatctatgcttattacacctggatatatacacctggatataaactggagtttcttgtttgccctcttgtgtacttacagtgccaggtttttcttaggaatgtcccatctgcccttgttatcagcatctatctagctacactctgacaggataactgcaaactgaatgattcctgggcatcataatggatgtttctttctacttaggtgtctcccctcctctctgcttctatctagcatgccggatttgggtggtccctggggtgtgggatgtcccagggactctctctcctgctcttgggtagctatctgccttctctaacaatgtcatcaaagattacactttgggaacaggcattttcaaggatacacagcctcaggactgctaatgttaacttttttctgcatattaattcataggactctattacgacaggtgctacagacccacagttcaaagagacagtagggacagcccaggcagctcccttttctccttagattcagtgaatgcacacattttcccaacccactgtggctttaccccttgttgagttctagcatcacaattgctttatgaaccagccgagcatggtggcacatgcctgtggtctcagctactcaggaggttgagtcataagaattgcatgaactcaggaggaagaggttgtagtaagccaatattgtgccactgcactccagcctgggcagcagaacaagactctgtctcaaaaaaaaaaaaaaaaaaaaaaaattgctggccaggtgtggtggctcatgcctgtaatttcagcactttgggaggccgaggctggcggatcacctgagatcaggaggtcaagaccagcctgaccaacatggagaaaccctgtctctactaaaaatacaaaattagccgggtgtggtggcgcatgcctgtaatcccagctactcgggaggctgaggcaggagaatcgcttgaaccccggtcatgagccaagatcgcatcattatactccagcctgggcaacaagttgttgttttgaaaatccatctcaaaacaacaacaacaaaaatgctttatggaagaaagtacagaaagcgagaaagggatgtgatgaccaaagcagggaataaatgtttggagtccacggcaacttcttgggaatagagtctaggcccccactgctgtcactctcacccagcctcctctacacatgtgagatgtttcaggaccctgtggcctgtgaggatgttgctgtgaacttcacccaggaggagtgggctttgctggatatttcgcagaggaaactctacagggaagtgatgctggaaactttcaggaacctgacctctataggtaaggatgacaatattccttccctcagtccattagtgaaccagtgtttctagctcatgaatgctgttgagtcatttggaacatagacaggaaatactttgatgaataaatgaggcatggctgcagtaaatcatagacatagaatctaataattttttcacagttttatattgcttcaggactacttttctgtgtctgtattttagggaaaaagtggaaagaccagaacattgaatatgagtaccaaaaccccaggagaaacttcaggtaattggcacttaaagagaaagcagtgtctctagatgattttagtatatgataatatgttgaagagaagtaaaacaaagaactaagtccagtatcaaattcatctcttcttagaatattttctcaaaatcatatatttacatgtgactaagtctgagggctcactcctgtaatcccaatcctttgagaagtggagataggaggatagcttgaggccagcagttcaagaacagcctgggcaacataatgagaccacaaatcaacaacagcaaaaaattagctgggcattgtggtatgcatcgtagtcctagctactcaggaggctgaggcagaaggatcactcaagcccccaggagttaaaggctgtggtaagcaatgatgatatcactgtactccaggatggtcacaggatgagaccctgactcgaaagaaaaatcacacagagtatttagtacttgtaaaatagtttacatgggaatagtattaagccccttatgagtatttttttaaacaataggtatgactatgtcaccttgtagaacatgttgtccatttaccttcaaacaattcagccagggcagaaagcctacaccttgatggaccatgttaaaaatgcaagtgcaatacttgattaatacaaaattactcataaacccttcataatgtgcttctcacttttgacaggagtctcatagaagggaatgtcaatgaaattaaagaagacagtcattgtggagaaacttttacccaggttccagatgacaggctgaacttccaggagaagaaagcttctcctgaagcaaaatcatgtgataactttgtatgtggagaagttggcataggtaactcatcttttaatatgaacatcagaggtgacattgggcacaaggcatacgagtatcaggactatgcaccaaagccatataagtgtcaacaacctaagaaagccttcagatatcacccctcctttagaacacaagaaaggaatcacaccggagagaaaccctatgcttgtaaagaatgtggaaaaacctttatttcccattcaggcattcgaagacgcatggtaatgcacagtggggatggaccttataaatgtaagttttgtgggaaagctgtccattgtctcagattatatcttatccatgaaagaactcacactggagagaaaccgtatgaatgtaaacaatgtgttaaatcctttagttattctgctacccatcgaatacatgaaagaactcacactggagaaaagccttatgaatgtcagcaatgtgggaaagcattccatagttccagttcttttcaagcacataaaagaacccacactgggggaaagccatatgaatgtaaacaatgtggcaaatccttcagttggtgtcattcctttcaaatacatgaaagaactcacactggggagaagccctgtgaatgtagcaaatgtaataaagcattccgtagttacagatcctatcttagacataaaaggagtcacacgggagagaagccttatcaatgtaaggaatgtagaaaagcattcacgtatcccagttcccttcgtagacatgaaaggacccactctgcgaaaaaaccttatgaatgtaagcagtgtgggaaagcattatcttataagttttcaaacacacctaagaatgcgctctggagaaagaccttataaatgttagatatgtgggaaaggcctttattctgccaagtcatttcgaagacatgaaaaaactcacactggagagaaaccctataaatgcatgccatgtggtaaagccttcaatctttccagttcctttcagtatcatgaaaggactcacactggagagaaaccctatgagtgtaagcaatgtgggaaagccttcagatgtgccccacaccttcgaaggcatggtaggactcactggagagaaaccctatgagtgtaaggaatgtgggaaagccttcagatctgcctcacaccttcaaattcatgaaaggacacaaacacacataagaatacactctggagaaagaccttataaatgtaagacatgtgggaaaggcttttattctcccacgtcatttcaaagacatgaaaaaactcacactgcagagaaaccctatgaatgcaagcaatgtggtaaagccttcagtagttccagttccttttggtaccatgaaaggactcacactggagagaaaccctatgagtgtaagcaatgtgggaaagccttcagatctgcctcaatccttcaaatgcatgctgggactcaccctgaagagaagccctacgagtgtaagcaatgtgggaaagccttcagatctgccccacaccttcgaatccatggtagaactcacactggagagaaaccctatgagtgtaaggaatgtgggaaagccttcagatctgccaagaaccttcgaattcatgaaaggacacaaacacacgtaagaatgcactctgtagaaagaccttataaatgtaagatatgtgggaaaggcttttattctgccaagtcatttcaaatacctgaaaaatcttacactggagagaaaccctatgagtgtaagcaatgtgggaaagcctttatttctttcacttcttttcgataacatgaaaggactcacactggagagaaaccctatgagtgtaagcaatgtggaaaaaccttcagatctacctcacaccttcgaaaacatggtaggactcacactggatagaaaccaaagcaggtgaatcacctgaggtcaggagttcaagactggcctgatcaatatgatgaaacccctgtctctactaaaactacaaaaattggccaggcgtggtggcctgcttctgtaatcctagctagttgggaggctggcacaggagaatcgcttgaatctggggggcagaggttgcagtgagccaagattgtgccattgcactctagcctgggcaacaggagcaaaactccgtctcaaaaaaaaaaaaaaaaaagacttggccttgtggtgaggggatgtcagctctagactcctggagctgtttttgccttattctctaaagactaaaatatttcataaaatgtatgggtgctgtttaccagaaagtacgttgggtaaaacatagaaattcatttataccttagaaagctatttttttcaggttggtttagtgagtcacaggaagctaataaattacaataataatgtaaattgtctaaatacagccttttctttctctgataatgtgctgttgatactaacttgtcaacagcctgtttatttcagccatgtaaagttaatggcaacatggaaaagtcacttttatatgttatgcaatggcatggaaaaattcattttcattaaggttccaatgaagctgctcttcagaaacgcttatttaaaactccctaaggtcaaagtccaggcatcacgggatgcagcatcaatcactgaccaaaccctgtctgtgtgtggagatgacatacccagtcccagataatgtatccacatcagtgaagggtggaatcattgattgtcagatcacacagcatgattcacagcagggaagacagggcagtgacagaggtgggggcacctgagcaggtacggtggctcacacctgtaatcttagcactttgggaggccaaggagagtggatcacttgaggtcaggagttcaagaccagcctggccaacatggtgaaaccttaagaaatagataaattagctgggcatcgtggtgtaatccctgtaatcccagatactcaggaggctgaggcaggagaatcgcttgagcctgggaggtggttgttacactgaactgagatcacaccattgcactctccaacctagtcgacagagcaagactctgtctcaaaatgaaaaaaacaagagttgggtgcacctgaatccaacccctgccttatcctcccttgaaggccaaatacaccctgacacttttaaccaaacagtagaaacaacaccatccacttgaccccaaatgtgactttccacaggatgcaagcacaatgttggaatggccaatgacagtgacaatgaaagtgcagggtgagggtgatgaacaggacacactggagagcctgacattggcctagactatggaggtgtcttgatgtttcacaaaaagcccaaggaccaacccaaagagacactggagcacaggcccaaagggtgttcatatgccaggaaggctactaattttagaaggcagtgatggtgcctgtttgagtccggatgctttataacttctgcttttctgcatctgcttagacaaagaaatctgcagtttttgagtttcagtgtttagaagtaagttattttagcaatctacacacttgtggtttattctgagctaacttcagacacacagctacagatagggaatatcacgagtatttccaaggctaaaagtcttcatgaagtcagtgggaccctctcatgggagggttttaagacccacaatcaaaaaggtggggaaacattagagtggaaagagggcagcaggtcaggggccttccccagaggtctaacacacccaacattattaccctggatgaaaaccaatacatatcataacaccacacacactcttcaatgtttcacagacaaaatgaaatgtattcaaagctaagcttccagaattccactttacacaataaggttttaatatcactctgtgttgatgttaggcaattactaaatagcattttctggttatctatggaaaataccttgatttctgggatatgaaaatgctcatttttagatatgcttgtttttgaactttttttaataaaataaggtgagaaaacaggaaaaaaattttcagatcaaggaacttaggcgaattaataggagaaaagtcatacaaatttatttaacatgtatatatgggagccttcagaatgaggacccacccaacaataagacaaaaaagcttacataccattctgaggccaggaaaaatgcagacttggcatggccaaaaaaattccaggtttggtggggaagtcatttttaatggcaagacagattatgctaaaggaaaggaagaagcttggctagcaaaggagaccttgttatgtagatgaaggctccctcagagagaataggtgggaaatgctgcttttcagacttttatttagaattttaagtaatagagtcaggattatgctgtgttgcccaggctgttctctaattctttgtctcaagcagtcctcacagctcagtctcccaaagtgctaggattccaggcatgagtcaccatgtccagacagggtttgtccccttgtaaagaattattcattgctgggcacagtgattcacagtgacgtctgcctggcatctgcctgtaaaggaagcatggcaccagcatctgctcagcttctggtgaaggcctcaggaagctttcaatcatagcggaaggtgaacggggagcaggcagtcacatggcgaaagcaggagtgagacagagagagtggtgtaggaaggtgcagctcactagaactcactgattatcacaaagacagcaacaagccatgagagaaacaagccataggtccccctgacccaaacaactcccatcaggactcacctccaacactggggattgcagttcctcatgacattgggtgggaacatacattcaaactatcacgtgacaatattacttccctcagtttattaaagaacaagtgtttctagctcttcagtgctgttcagtgatttggaatatggacagggaaaactttgataaatcaggaatggctgcagtgagccatgaacatagaatctaataatttttaaactaattttataatagctgggcatggtggctcatgcctgtggttctagcactttgagaggccaaggtgggtggatgacttgaacccaggagtctgagaacagcctgggcaacatggtgaaaccctatctctacaaactttttagccaggatggtgacatgcacctgtaatcccagctacttgagaggctgcagtaggagaatcacctgaacccaagaggttgaggctgcagtgagctgtgatcatgccattgcactccagcctgggtgatagagtgagaccctcatctccaaaaaaaaccccataattttataatcaggactattttttatggatctgtattttaagaaaaaaatggaaagaccagatcattgaagatcagtacaaaaatctcaggaataatctaaggtaagtttccctcacaagataaagcattctctctctagaaaatcttatactgcctgaaaatgttttggtttttttggagacaagagtttcactcttgttgcccagactggagtgcaatggctcaatcgcggctcatcgcaacctccgcctcccaggttcaagtgattctcctgcctcagcctcccaagtagctgggattacaggcgcccaccaccacgtctggctaattttgaatttttagtagagatggggttactccatgttggtcgggctggtctcgaactcctgtcctcaggtgatccgcctggcttggcctcccaaagtgctgcaattacaggcgtgagccattgtgcccggctgaaaatgtttaaaatatgcaaataaaagaaataagaccagcatcacatttatttactcttagaaaattttctctaaaaacataatatttaaatgtgacataggctaggcacagtggctcacacctctactcccagccctttgggagaccaaagccagatgattgcttgaggctaggagtgagaccagccaaggcaacatggtgatacatcacctcattaacaaaaaatgttagctgcgcatggtggcacttgcctgtagttcctgctatttgggaggctgaggcaggaggatggcttgagcccaggaattccaagctaccatgaaccatgctcaattagacccctgccttatcacaaggacagagggctttctgtatcctaaggttcttgccttggtatactggaagaattgtatcacacgtgggcttggagaatgagtgcaagttttttctttttttttctgagaaagggtctcactcttgtcgcctaggctggagtgcagtggcctgatctcggctcactgcaacctccacctcccaggttcaggtgattctcctgcctcagcctcctgagtagctgggattacaggcacctgccaccatgcccagctaatttttgtacttttagtagagatggggttttgtcatgttggccaggatggtctgcaactcctgacctcaggttatccccccatctacgcctcccaaaatgctgggattacagatgtgagccactgcgcccggccgaaaatgcgaactttctcctttgggtactaccattttggtgggcatcagatccatgcccgagctctgtgggcgctgctgcctctctccacctcaggcaccacatcccaggagccccaatcccactgcctggcttgtgctttagaacagctgctgctgcagggccctcagctgccactaccaagttgcgatttagaagtcttttaatgcatttaaatatcttagaatttgtcttccccactttatacacacaatcatgaggagagcagggactctattggtgtcttattcacacagtgggattgagggtgtttgtctcatgaaactgatcaatgaagtgagaaacagctgaataacctacagggggcagcagagcctgaggccagtgtgggcctgcaaaggaagggaaagggagttccttgggggcttccggggctccccgccttcccctgcaggtggcctccagctgcccagaacagctgcagagagtgtggattctgagaagctgcagggccctggaaagcaggagacccacgtgcaggtgcgcttagggggttccatcctttctgaggttgcccttctggagcctggggccattttctgggaagtgttttggttttgacatgtatagggtcgctggggtcagaatgtaattgttacatatgaagaaaatctgtgaaggtcagcctcagtgagacttgttgggtttgtcttataacagggtttatgaaattgacagtttatttaggtcagagcttaaattatcaccaggtgagagtttcctgctgaggaaaatgaagatctggaaggagagagcatttctacactgtgagggggcgcggagtgggggtgaggggagcgaagatgaggatgctttggctttgcctcatctgcatttctggctctctggaggacatctgcttctccctcctggtgtggtcattcttggcctggtctgggttcccttcctgctctgaggcaaagggggtggctttgtgggggcaataggcccttggtgtctgtcctaaaggtttgctgaaaactcattgacatgaggcagttggagtaactctgaaaaggcatacaaatttatttagtgtatacacacaagagccttcagaatgaagactccccagcaataacacagaaaagcttatataccatcctgaggacagcaaagaatgcagactcattatggtccaaaaatcacatgttatgttggcaaatcggatgtagtggcaagacatcttctgagagagggaaagaaaggggcttggctagcaaagatggactgttatataaatgaagcctctcacagagagaagagaaatgcttcttttccaactttttaacatttttctttttatttggatacttaaataatgaaggtgggagtctccctgtgttgaccaggccttcaactccttgctttaaggcagggatgtccaatcttttgccttccctgggccacactgaaagaagaattgtcttgggccacacataaaacaaagctgatgagctaaaaaaaaaaaaagaaaaaagaaaaaagaaaagaaagaaaaaaaatcgcaaaaaaactgtattttttttttttagccagagtctcactctgtcgcccacactggagtgtagtggtgtaatcttggctcactgcaacctccaccttcgggttcaagcgattctcctgcctcagcctcctgagtacctgggactacagacgcctgccaccacacctggctaatttttgtatttttagtagagatggggtttcacatattggccaggctggtcttgaactcctgaccttgtaatctgcctgcctcggcctcccaaagtgctgggattacaggcgtgagccacagtgcacggcagaaaatcgcaaaaaaaatttttaaatattttaagaaagtttactaatttgtgttgggctgtattcaaagccgtccttagcccgcaggccataggttggacaagcttgctttaagggatcctccagcctcggcctccggaattgctgggataggaggcgtgagtcacggcttcctacctgtgttcaggttttaaagacgtcagaccccgaatctctactagttccagtgaagggaaataagcagggaggaggccatggctttgttaacggagattctccgcagatgcgcattttcctcccaaaggcacctttgcaagaccacactgttggccaagcggccacgatttcaaaatatgtcaaaggagtaaccgggcgcggtggctcacgcctgtaatcctagcactgtgggaggctggggcggatcgcttgagctcaagagttcgagaccagcctggctgaaaccccgtctctactaaaaatacaaaaattaacaggggtggtggagcacacctgtagtcccagctactagggaggctgagacagtaaaatcgcttaaacccaggaggtggagattgtcgtgagccaggatagcgccactgcactccagcttgggtgacaaagtgagacccagtgtcaaaaaaaaaaaaaaaaaaaagtcaaatatattttggagtaaaaaaatttaatttccttcacctccgttggactcttgagtctggaattccctacacacatttgtgaccctgtgcaggacgaaggaccccattgagtgaaaaagacaacagtgtcccttatagcagttaggagcaagtttggctcaaatgccagtatccgaagagcagggagctgaaagtgagcccatttagggaacctgcggctggaatagcagcgaccggctctgcagcgccctgttacccggggcttctgctgtcactcagggctgagggggcggggtaggatgccctatccaatcggggtgctggggcggggccctgccaactgtttaatccgccggaaggagggcgcagcattgccggtcttctcattgcctggctgctagaggaaacccgaagtcgggattctttctttcctgctctgagagggaccaggtccctcctccgtagcttttgtctctctattgcctgcgccgtgtcctggactgctcacgggagttctgcaggagacgccggaatatctggaagctgaaaaatggtgagtgtgcggagccggaaaccccgaggtgggtttgggggttaggggacggtctagtcagaaccgcggaatcggaacgcgggcctccatgttgcgactcgggggtctgaggcccgagttcccctggcgcagctcagccctgggtccccttggcctcagggtgggtctgggcggcagtcgggaccccaggcgtcctgtcgtccctgctcggcgactgggacccctgccccggagctctctctggggagctctgcgcccgcagccgcgcgtctccccaaattgtgcggaagtcgtggagggaatcccgcctcgtgtgtggggttcccagtcgcacgtttcttctgttaaaaattaaactgagacactgttaacaagtaaagagtattttgggtaaacagccaatcatgaaggagaaacaccgggtcatgacttgttaacggaaaaaaaaaaccaaacagtaaaataacttaaagaagttttattttgacctggcgtggtggcttacacctgtagtcctagcactttggctggccgagatgggtgggtcacctaaggtcaggagtttgagaccagcctggccaacaaaccctatgtagggtccagccctactgggcctgtgggtttttttcctcgtgtgcggagacaagagatcatagaaataaagacacaagacaaagagaagaaaagacagctaggccggggggaccactaccacctaggtgcggagaccggtagtggccccgaatgcctggctgcgctgttatttattggatacaagacaaggggggagggtaaggagtgtgagtcatctccaatgataggtaaggtcatgcgagtcacgtgtccgccagacagggggcccttccctatttggtagctaaggcggggagagaggacagcttatgtcattatttcttctatgcatttcaaagactttagtactttcactatttctgctgctgctatctagaaggcagagccaggtgtacagggtggaatatgaaagcggaccaggagcgtgaccgctgaagcacagcatcacagggagatggtcaggcctccggatggctgcgggtgggcctggctgatgtcaggccttccccgagaggtggtggagcagagtcttctctaactcccccggggaaagggagactctttcccagtctgctaagtaacgggtgccttcccaggcgctggcgttaccgctagaccagggagccctctagtggccccgtccaggcgtaacagagggctcacacttgtcttctggtcacttcttaccgtgtcccttcagctcctatctctgtatggccatgtttttcctaggttataattgtggaagaaatataattataatattggaataaagagcaatgctacaaactaatgataatgatattcatatataatcatatctataatctatttctagtataactattctttttctatatattttctttattatactggaaacagcttgtgccttcggtctcttgccttggcacctgggtggcttgccgccgacatctcccccgtttttattgactaggatcgtcatcgccatcattgcttgtcgctgacttcggacttgtcctcggactccttggagacatctgcagactagaagtagacaacataaacataccaatattaataatgccagtgacaacaatgatcctccgaggggtttgatccatttaaagggattaagatcagacaatcttttagttattccctcaaaaatgtctgagccagggcagtagttaaatgagactgtgaggcctcaaaaatttgttctttaagttttgaaatatttaaggttaaattatcatcctattctaaatgatgaggttattgaacaattatgaaaatgttgcctagatgcttgggataagattcaagatgatggcaaagtatgtccatcttttatgcccgtcagacagggacaacatgaaccctatgcagacttcattgcccatcttcaagacgcagtagaaaaagctatccctgatagccatggccaatgacttcttgtagaacttatggcttatgatcaagcaaatccagatttcttctccttatcactgtttaggaatgcagctagaagctagaagacaagaattaagccccacgatggtcacttctcatcgtgtcccttcagctcctatctctgtatggcctggtttttcccaggttataattgtagaacaaagattattataatattggagtgaagagcaatgctacaaactaatgattaatgatattcatatataatcgtatctataatctatttctagtatattcttattctatatattttctttattatactgcaacagcttgtgccctctgtctcttgccttggcacctgggtggcttgctgcccacaaccccgtgtctaaaaatacaaaaattagctgcgcatggtggtgggtaccagtaatcccagctactccggaggctgaggcaggaggatcgcttgaacccgggagatgaaggttacagtgttatgaaagaccttggcggagggaaacaaccccaggaagcctcgagtaagtggtcccgaggcagctcatgacagtttggttttattcatttcagggagacaggaattgcagggaaaatcatgacttagtgcttggaaggtgtgagttcctttggccgaaaggcgggacttgtggtaatggggttagaaggcacaggtggttgagggattctgtgggtggcagttggttgagagtgtgaagttttggtctaaaattcagaggtggataaaaaggaacaaactaatggcatttgcagcaacctggatggaattggagactattctaagtgaagtagctcgttaaaatggaaaaccaagcatcacttatgttctcactcataagtgggagctaagctatgaggatgcaaaggcataagaatgatacaatggactgtggggactggggaggatgggaaagggtgggaaggtgggtgtgagggataaaagactacacattgggccgggcatggtggctcacgcctgtaatcccagtactttgggaggctgaggcgggcagatcacctgaggtcaggagttcgagaccagcctggccaatattgggaagccccgtctctactaaaaatacaagtgttagctgggtgtggtggcacgtgcctgtagtcccagttactcgggaggctaagacaggagaactgcatgaacccaggaggcacaggttgcagtgagtcgagatcctgccactgcactccagcctgggcgacagagcgagactccatctcaaaaaccaacaaacaaaaaacccaaaaaccgaaagactacaaattgggttcagtgtatactgctccagtgatgggtgcaccaaaatttcacaaatcaccactaaagaacttactcatgtaaccatataccacctgttccccataaacctatggaaatatgtatatatatgtatttaaatttttagaggcggtaggaaggaatgctgtaggaagaggggctgttatttgtcacatgattccatccctgcccacgaaacaggcctgtgtcaccagattttatgaattctgagacatgaattacccttttccttaagtccctttagatggtgtttgtaatttcatgtcttactgccacagaatctgttttgtgagtctgacgatgtctaatgaacatgaatgtagatcagttgctgtgtatatattctaaaagagagacagtataaggaggctactccgatcttcccgtcacagcggggaactccattttgagagtttttattggtgatcttggccaagagcaggtcagttcacttagttgttggtgggggagctgcttaattttgttaacagcttataggttggaggacaggcttttataatgtgaaaggaaaataaaacctcaggaccccaatttttataccaaaaggaaaatattaagctaaaagctgagtcaagcaagaagttgcctttctttttgttgctaagtgaatagctacagataaaaagttatatatcttggactgggcacagtggcttacgcctgtaatctcagaactctgggaggctgaggcaggcggatcactagatcaggagttcgagaccagcctgaccaaaatggagaaaccctgtctctactaaaaatacaaaacttagccaggcatggtggcctgtgcctgtaatctcagctaatcaggaagctgaggcaggagaatcacttgaacctgggaggcagaagttgcagtgagccacgatcgagtcactgcactccagcctgggtgacagagcgagactgcatctaaaaaaaaaaaaaaaaaaagttatatatctccacaggaaactgtgtatctcaagtaaagtgttgatttactgggtgagacacaaatacctaactgactattctcttgcctgcttctttcctgttgcagtatgtggattacatactaaccctccctcttacctatccagcacacttttcccctttatatattgaagtcctcaaaattgtccttggagaaagtcacagactgttgctgtgattccgtgttgatttcttctgggtctattcttaaccttgggaaaataaacttctaagttgatccagaagcatctccaatatttttggtttacaatatgttgcatgaggagccaaaccatattaaatactagattgtttacagtgatgcagttgccttctttggacttgtcaacttgaagtagttgaaaagatcagattccagttttgaagcatttattcaagtagtaagctgagaatggcctatttgggaaaacacagactccagagaaatggctcagtgctctgaagtcagatgttaaattcttccctatataggcaaaaggcaaagaaattgaacaggattacattttccatagaaggctgatgtatgaggtacaacaatttaatttgttacagtttgctttttttctcctaggcctttattttcttgacagctgattttcatttccttcccaatttaaaagaatgagtttggccaggtgcagtggctcatgcctgtaatcctagcactttgggaggccatggtgggtggattgccttagctcaggagtttgagaccagcctgggcaacacgatgaagccccatctctactaaaatacaaaattagctggctgtggcgacgtgcacctgtaatcccagttacttgggatgttgtgggaaataaaggactagagagactgatacaaggaacgggagaattgttcatttaaggtacgcaccggctcagtggattcacatctaaaaagctgagcactgaacaaagactgagcgaggttttcataagcaaacttacagaagcaaaataaaagtaatcatacagtgataggtcacgtaatctatagcatagcataacttgtggccttgcatagctggtggccttgtagctgcatttaaagaaaaacaagaactgactaaatacagacttctttccttttttttttttccttcaccttcgttctggaggggggatgtctggaacctattcttttggctttgacttctcaaacagcattataactgtctttgaagtgagcttgctaggcagaggaaaacttgttcttttctttttaacctttgccttgcctgttacttttcttggagtgaatgaatgcatatttattttttaaatttctggcttagggaggctaaggtaggagaattgcttgaacccaggaggttgcagtgagccgagatcgtgttattgcactccagcctgggtaacagagcaagagttggtctcaaaaaaaaaaaaaaaaaagagtgagttgaacattccagcttaagacagtgtgatagccatgaagtctttgtgtgagaaagggtaagatgaaagttcatctacaatggagatcaagagtgaagagggaaggggtcttccctggctcccttcaacatttacatgtcaacattgacataattttatgaaacaatatgggtaagaatgaagacaaaaaggcaaatccacagtctgggaaaggaaagttccagctgcctgtcatgtgactcaatgccaccttaatcacattgctttaaggctcaagataatttagagatggaacagctcacatttttggctttagtttcacagactgtacaggtagaaaatgttctggttatgtaatcaggttaattgggggattttggttggttaagcctaaatttcatttccctataaattattattttatcagaattgtatttgagttgtatttcagggtccttaggtaggtcctagggcactacacacagttcagtcttactgtttctcatttatttatttatttattgtttttttgagacagggttttgctcactgcaacatctgcctcctgggctctgggtgcgagcagtcctcccacctcagcctcctgagtagccaggactgcaggcatgcaccatcacacctgacttaattgttgtattttttgtagatgccaggttgtccagtctagtctcaaaatcctgagctcaagtgatccatcagcctctgtgtctcacccaaagtgctgggattacaggcgtgagccacagtgcatcgcctcatttaatttttttttttttttttttttttttttttttgagactgagcctagctctgttgcccaggctggagtacagtggtgtgatctcggctcactgcaacctccgcctcccgagttcaagtgattcttcggcctcagcctctctagtagctgggattacaggcacacaccaccacgccccactagtttttgtatttttaatagagactgggtttcaccatgttggccaggctggtcaagaactcctgacctcaagtgatccaaccacctcggcctcccaaagtgctgggattacaggcgtgagacaccgcgcccggcctatttaaattttttagcactcgccttggggactggtttcccccacattttccaaatagattggatgcagtgtctgctattctccaccctgtgtccgaggctaactcttcaagggcttgcagtagaaatcctaaatgttcagtttctctcccgcgtttccaacatcaactccattctccagttcacaatattatcaactatttcttctttatagtacaacattgtatttattcatcccgtttaaaacagatgcagtgtattttaattgtttattattttatcacagagcaatagatgattctttttaaagtatttgtttgctatttctgaaaatttcacatgagaagaaggcagagaaaaatcaccacacatctcagtgaacaaaacctttgtgcctctccttttatttttcctaggcacagacatcaggatgtctttgggttgaggttcctttttggaaactttacagaatgatctgtcttccgttccccctccaatttttcctggtcctgggtttcagaactgcctaggctgagccaagatacccaccactgccatgtctcttggagggcctagtacatatcagcccctgagtcatacctcccagagcacagcctgaagtagaggagtggggcctcccaagggagtagctgaatgccttgtggtgggaggagactcctggtataatcttcatctagataaccaatccccttggggtgctcagcttttctccctcaaccccagtttccattatttggagatacatggctggtcagccaattggattttgctcctgagaggaaagagaaatgattcctgtcctctggattgtctcagaaatgtaaagaaagaaaacttttttttttttttgcctttcccatgcatactgagggagaaaactcaaaacgtgtgggagaaaacaaaacaaacagaaaaagttggtgcaaaagtaattgaaaagtaattgtgctttttgcattgttgaaatttgctgtttgatattggaatacattcttttttttttttttttttttttttttttttttttttttttttttgagacagagtctcgctctgtcgcccaggctggagtgcagtggtgcaatcttggctgactgcaagctccgcctctcgggttcacaccattctcctgcctcagcctcccgagtagctgggactacaggcgcccaacaccacgcctggctaatttttttgtatttttagtagagatggggtttcactgtgttagccaggatggtcttgatctcctgaccttgtgatccgctgcgtcggcttcccaaagtgctgggattacaggcgtgagccactgcacctagccttcttcttttttttgacagagtcttgctctgttgcccaggggcatgatctctgctcactgcaacctctgcctcccaggttcaagtgattatcatgcttcagcctcctgagtagctgggattacaggcatgcaccatcattgccagctaatttttgtatttttagtagatttggggtttcaccatgttggccaggctggtctccaacacctgacctcaagtgattctcccaccttggcctcccaaagtgctgggattacaagtgtgagccactacacctggcgccaaaaatcttaatgatcttggacttaggaaaaagattctatgacatgacaccaggagccctaggatcagagaacaagtatgtcatttagactacatcagaatttaaaacttttgtgcatctggccaggaatggtggctcacacctgtaatcccagcactttgggatgcataggtgggtggatcatgaggtcaggagttcaagaccagcctggccaacacggtgaaacaccgtctctactacaaatagaaaaattagctgagcgtggtgtcacgcgcctgtaatcccagctactcaggagactgaggcaggagaatcgcttgaacccaggaggtggaggttgtagtgagccaagatcacgccactgcactccagccgcggcaacggagcaagactccgtctaaaaacaaaaacaaaaaacttttgtgcttcaaaaaacaccatcaagaaattgaagcctgtgtggccatgccaccctaaacgcatctgtttggcatagctaagcgggattgggcctggttagtaaatggatggagaatgcctgggaatactgggtgctatatgctttgaaaaaaagaagaagaagagggtggggaatttgacaagagaattccccaaatgagagaaaaccttccatattgaaaatctggtcattccccttcatgacatagggtagaggctgtattggtagccagcactctgaggcatcgtggcccattactgcaggaaatgaactctaccccgcagttctctctggcagtggtgtgcccacagtcccccagtctctcccagtttatggggtgacaacaaagtggtcatccggagagaaatctgaccttgtgtttggatttgtgagtacagacactcttcaggacaccctccttcctccccaaagaaaggaagctttttatcaccaaccattccagtcataggaagcagggtctgaagtctaagtccttattccatgcaaagggagattgcactgaaaacttgttaaaaatgtcaaggaaggcttcattcaacacaattgcaatatgtgtcaggagaactgtaatatgggaaagagattgaactcaatctggaatgcatcaagagaattatagctaaagagtagggtgagggagaggatggaatttggttaggtgtcaagagttgggagactgattaattatcatagatgggggaaatggaacttgattagataccaagtttgagggcattctaagctctaagtctggtcaagaagagggttctgaggagcctgactcaactttggtcaaggaaggagtccttgagattcccccagcctagttcttgctagggctgatgataaatccttaaatttctggtttcctccccacgttccagaacacccatttcttctctctagtggacattatcaactatgtgtccccagtgatacatttgaaactgctgcaatattgtttattttttgacagagcaataagtggctctgtgtaagtttgagacagtctccctctgtcgcccaggctggagtgcagtggtgcaatcttggctcactgcaacctccacctcctgggttcaagctggtatcctgcctcagcctcctgagtagctggattacctatgtatgccaccacactgggctaattttttgtatttttagtagagacagggtttcaccatgctggccaggctggtcttgaactcatgacttcaagtgatccacccgcctcagcctcccaaagtgctggaatttacaggtgtgagccaccgcacctgacctctgtgtaaatttttaaattttgtttataaatatttttcatgagtggaaaacactcaataaccactcaactacattgtgtaaatccttgtgcctaatgactcctgatgtcgaccatctttcgcgtgcttactagccatttgtatgtatcttgcagaagtgttattcagatactttcccatcttttaaggaatcagtatttttttttttttttttttttttttttttttttttttttggtgagacagagatttactcttgttgcccaggctggagtgcaatggcgcgatctcggctcaccgcatcctccgcctcacaggttcaagcgattctcctgcctcagcctcctgaatagctgggattacaggcatgtgtcaccacgtccggctaattttgtatttttagtagagacggggtttcaccgtgttgcccaggctgatctcgaactcctgacctcaggtaatccacccgcctccgcctcccaaagtgctgggattacaggcatgagccactgcgcccggccaggaattagttttttacttggtacaataattcattatagttaagtattgtaagaaatcttaaaatgtaccagctgaaggaattttacatgtacagttaagatagtttgacaaatctacttctctaagatgaataatactgtatttttatttttgtgactggctttttgcgattagtataccattgcttataccatggaacaggatgttattttctaaggctaaataatattccattgtatgtatatgcttaccacattttggttatccgttcagccatcaatggacattgatggattgatccacctcttggctattgtgaatcatggttttcaaatatctcttcaagatccagttttcaatttatttgaattgaataaaaatagacctggaaggccgggcgcaatggctcatgcctgtaatcccagcactttgggaggccgaggcgggcggatcatgagatcaggagatcgagaccatcctggctaacatggtgaaaccctgtctctactaaaaatacaaaaaattagccaggggtggtggcgggtgcctgtagtcccagccacttgggaggctgaggcaggagaatcgcttgaacccgggaggcggagcttgcagtgagtcacagtgagccaagatcgcaccattgcactccagcctgggcgacagaacgagactccgtctcaaaaaaaaggacctggaaatgggttgctggaggataacattttttaaattagcttttgagtaccaccatactgttttccatagaggttgaaccattttacattcctttggacagaacacatgagttccagtttttcaacattctttccaaaactttatatttggggtgtttgaatttttttctttgtagttgagtgtaggagttgattatattttctgaatattaagaccttgccagatgcatgacttgcttatatttgctccaatgtcatggtgataccgacgtgttgggaagggaagagcgtggtccctttaaataatacagaagtgggtaagggaagtgctgggtagaggagggtgtgatccctggctagggctccacccccacagacctaggtgaggacagttatttcctgcccaaatgttgcatttcccaagaccaccctggcccaccatgccccattctgggcctataaaaaccccagaccctagtgggcagacacacaagcagctggttgtcaagaggagcacgccagcagaagagcacactgataggcactggcacaccagcaggccatcagctggcggatgaggcagtccatcaactggcggggctggtgggacaaggcagagtttggctgagccagggccgttgagcagcccagctcccaggaagaccatctcgcttctggctcccctatcacttccactcaataaaactattcactcattctccaagcccacgtgtgatctgattcttctggtacactaaggcaagaacccgggatacagaaagccctctgtccttgcgacaaggtagagggtctcattgagctcattaacacaagctgcctataggcaaactaaaagaccacctgtaacacacgccccccactggggcttcaggagctgtaaacattcaccccttgacactgctgtggggctccactgctgtggggtcggagccccacagcctgcccatctgtatgctcccctagaggtttgagcaacggggcactgtagaagcaagtcacaccccattgcacacctgctaggggaacaagggaaactttcccttttcggtagggtgccttttccctctgtttgtagtgtcgtctcatgggcaaaagttttaaattttgataaacatttgctttttgttaagactgagctccctggaggttttacctctgaaccttgtccccattcagccttcagcagttcatcaattacaatttaagtttttctaccacaatactgtttctcacaaaggtttctgctcttcagtttttgatttagttagttatgactcatcaattaggttggttgagtcccttgcaaaaatcgagttgtggttttttttgttttttctttctgctaattgagtcagaacaaattctccctttcaggtatcctcaatggttaaactttgtgaacaggcattttcaaggaaacacactctcaggactgctaatgttaacatttttctgcatatgaattcagaggactttgttatgacaggcgctgtagacacacactacagacagacattagggacagcccaggcagcgtgcttttctttctggattcactgaaaagacatttcctgttctgctgttggtattgcttagttcagttttagcatcagaatcgctttatggaagaaagtgggtatacaccaagtgataaccaagtcatggaataaatgtctggagtccacagcatcatgggaacttcttaggaatagagtctaggcccccagtgctgtcagtctcacccatcctcctttacatgtgtgagatgttttaggactcagtggtctttgaggatgtagatgtgagcttcacccaggaggagtgggctttgctggatccttcccagaagaatctctacagagatgtgatgcaggaaaccttcgggaacctgtcctctataggtgagggtgacaatattacttccttccttcagcgaattagaaaacatggttttttttgttttttttttttgagacggagtcttgctctgtcgcccaggctggagtgcagtggcgcaatctcggctcactgcaagctccgcctcctgagttcatgtcattctcctgccttagcctcccgagtagcggggactacaggcgcccgccaccgtgcctggctaatttttgtatttttagtagagacagggtttcattgtgttagccaggatggtctcgatctcctgacctcgtgatccgcccccctcggcctcccaaagtgctgggattacaggcgtgagccatcgcacccggccgagaacgtgtttttagctcattaatgctgttccacgatttggaaatatggacagggaatatgtcagtgaataaatgaggcacggatgcagtgtaccatgaacatagaatattatttttattatagctttatactaattaagactattttcctggttctgtattttaggaaataaatggaaagaccagaatattgaagatcactacagaaatctaaggtaatttacacttacaaaatgaagcaatgtctttctagaaaatcttagaatgtgagactatgtttaaaaaaaaaaaaaaaggctgggcgcggtggctcacagcgcattttgggaggctgaggcaggcggatcacaaggtcaggagatcgagaccatcctaacacggtgaaaccccgtctctactaaaaattagcagggcatggtggcacgtgcctgtagtctcagctactcgggaggctgaggcaggagaattgcctgaacctgggagcagaggttgcagtgagccgagatctcgccatcgcactccagcccgggcgacagagtgagactctgtctcacaaaaaaaataagaaaagcaaatgaaggaaataagcccagcatcaaatttgtttatttattagaataataattattttttctttctgagacagagtttcactgttgcccaggctggagtgcagtggcatgatctcggctcactgcaacctctgcttcccagattaaagcaattcttgtgcctcagcctcctgagtggctgggattacaggagggcgctaccacccctggctaatttttgtatttttagtagagacagggtttcatcaccttggccaggctggtcttaaactcctggcctgaagtgatctgcctacctcggcctcccaaagtgctgggattacaggcattagccgccgcgcctggccactttttctttttctttttcttttttttttttttttttgagatggagtcttgctctgtcgctcaggctggagtgcgatggcccaatctcgatctcctgaccctgttgatctgcctgccttggcctcccaaagtgccggattacaggcgtgagccatcgcgcctggctgccacatttatttattcttaacacattttatctaaaatcctatatttcagtgtgacataaactgggcacagtgggtcacacctgtaatccaactatttggaggtagaggtggaaggattgctagaggcctggagtttgagaacagcctgggcaaaacagcaagacttcataacaacaaagaagtagctagacgctgtggcatgtacctgtagttctagctgctcaggaggctgagtcagaatcacttcagcccaggagtttgaggctgctgtaaaccacagtgatgccactacactccagcctgggcaacaggatgacccccattcaagaaaaatgatagaggtttagtatttgtaaagtactctatgggaaaatagtattaagaatttccaggccaggcacagtggctcatgcatgtaatcccagcactttgggaggccaaggtgagtggatcacgaggtcaggagttcgagaccagcctggccagtatggtgaaaccccgtctctactaaaaatgtaaaaattagccgggcatggtggtactcagctgtagtcccagctacttgggaggctgaggcacagcctcaatcttgaacccgggaggcggaggttgcagtgagccgtgcgtgccactgcactccagcctggtcaacagagcgagactttgtattaaaaaaaaaaaaaaaatttctatatagggtcaggcatggtggctcacacctgtaatcccagcactttgggaagcagaggcagttggatcacttgaacctgggaggcgttctggaggtcaggagttcgagaccagcttggccaacatggtgaaaccctgtgtctgctaaaaatacaaaaattagccgggcctcatggcacatgcctgtaatcccagctactctggaggctgaagcaggagaatcgcttgaacctgggaggcggaggttgcagtgagccgagatcacgccactgcttcttgctttaaaagaagagtaaagacaagagtgttggaccagtattgcagttctgtagtatcatttcttataaaaaacaaaacaacaataatttatcaaaattggcatataaagactgacaacattctaataaaggcacaaatttctttttaatacttgtttcaggctctttattctctttataagttaactaatctattttcttcaaacttctgcattagttctttaaaatcacaacacttagcaagctgacttttttaatgtgctcaatacaaatacttgtgaacttttaatatgttgagtgctttcattgtgataactggatctccatttgatattttcatttatataactcatttgcagtctgaaaatttttagtgccagtccctgaatatatcattgaaagttaattttctttgcattttaaaatatctggattatgaagaaaaagtgatgaaaataaattaaaactgaattaccttaaaaaaaaacaaaaaaaaaagaccaagcgtggtggctcatgcttgtaatcccagcactttgggagactgaggcgggcagatcacctgaggtcaggagttccagaccagcctgacccacatggtgaaatcccatctctactaaaaatacaaaagtagccaggcgtggtagcgtgcacctgtaatcccagctacttgggaggctgaggcaggagaattgcttgaccctgggaagtggaggttccagtgagccaagatcatgccactgcgctgtagcctgggcaatgagagtgaaactctgtctcaaaaaaaaaaaaaaaaaaaaaaaaaaaaaagaatgtcactttctgacaggcccaggagcctcaagttatcttgggaccttgacaggaggaaaattcactcaactcatacaggtatttgcaggcatagataagtctgtggctgggcttcaaggctttaaaaagtacaatctgagattccttagtgaacaaagtttcagcaaagccaatttttaaaaagagtttagtctcagaactaggaaattggctaaaaagatatgggacaagatatttaaatttgcctttttctgtctatcccaatctaacaacctctgacccaaatctcttgctgctaatgaccccatgtctgattggttttcagagctgctttttttttttttttttttttatactttaagttttagggtacatgtgcacattgtgcaggttagttacatacatatacatgtgccatgctggtgtgctgcacccactaactcgtcatctagcattaggtatatcccccagtgctatccctcccccctccccccaccccacaacagtccccagagtgtgatgttccccttcctgtgtccatgtgttctcattgttcagttcccacctatgagtgagaatatgcggtgtttggttttttgttcttgtgatagtttactgagaatgatggtttccaatttcatccatgtccctacaaaggacatgaactcatcatttttttatggctgcatagtattccatggtgtatatgtgccacattttcttaatccagtctatcattggtggacatttgggttggttccaagtctttgctattgtgaataatgctgcaataaacatgcatgtgtctttatagcagcatgatttatagtcctttgggtatatacccagtaatgggatggctgggtcaaatggtatttctagttctagatccctgaggaatcgccacactgacttccacaatggttgaactagtttacagtcccaccaacagtgtaaaagtgttcctatttctccacatcctctccagcacctgttgtttcctgactttttaatgattgccattctaactggcgtgagatggtatctcattgtggttttgatttgcatttctctgatggccagtgatggtgagcattttttcatgtgttttttggctgcataaatgtcttcttttgagaagtgtctgttcatgtcctttgcccactttttgatggggttgtttgtttttttcttgtaaatttgtttgagttcattgtagattctggatattagccctttgtcagatgcataggttgcgaaaattttctcccattttgtaggttgcctgttcactctgatggtagtttcttttgctgtgcagaagctcttcagtttaattagatcccatttgtcaattttggcttttgttgccattgcttttggtgttttagacatgaagtccttgcccatgcctatgtcctgaatggtaatgcctaggttttcttctagggtttttatggttttagggcaaacgtttaagtctttaatccatcttgaattgatttttgtataaggtgtaaggaagggatccagtttcagctttctacatatggctagccagttttcccagcaccatttattaaatagggaatcctttccccattgcttgtttttctcaggtttgtcaaagatcagatagttgtagatatgtggcattatttctgagggctctgttctgttccattgatctatatctctgttttggtaactgtagccttgtagtatagtttgaagtcaggtagtgtgatgcctccagctttgttcttttggctcaggattgacttggcggtgcgggctctttttcggttccatatgaactttaaagtagttttttccaattctgtgaagaaaggcattggtagcttgatggggatcgcattgaatctgtaaattaccttgggcagtatggccattttcacgatattgattcttcctacccatgtgcatgtaatgctcttccatttgtttgtatcctcttttatttccttgagcagcggtttgtagttctccttgaagaggtccttcacatcccttgtaagttggattcctaggtattttattctctttgaagcaattgtgaatgggagttcactcatgatttggctctctgtttgtctgttgttggtgtataggaatgcttgtgatttttgcacattgattttgtatcctgagactttgctgaagttgcttatcagcttaaggagattttgggctgagatgatagggttttctaaatatacaatcatgtcatctgcaaacagggacaatttgacttcctcttttcctacttgaataccctttagttctttgtccttcctgattgccctggccagaacttccaacactatgttgaataggagtggtgagagagggcatccctgtcttgtgccagttttcaaagggaatgcttccagtttttgcccattcagtatgatattggctgtgggtttgtcatagatagctcttattattttgaaatatgtcccatcaatacctaatttattgagagtttttagcatgaaaggttgttgaattttgtcaaaggccttttctgcatctattgagataatcatgtggtttttgtctttggctctgtttatatgctggattacatttattgatttgcatatattgaaccagccttgcatcccagggatgaagcccacttgatcatggtggataagctttttgatgtgctgctggattcggtttgccagtattttattgaggatttttgcatcaatgttcatcaaggatattggtctaaaattctcttttttggttgtgtctctgcccagctttggtatcagaatgatgctggcctcataaaatgagttagggaggattccctctttttctattgattggaatagtttcagaaggaatggtaccagttcctccttgtacctctggtagagttcggctgtgaatccatctggtcctggactctttttggttggtaagctattgattattgccacaatttcagagcctgttattggtctattcagagattcaacttcttcctggtttagtcttgggagagtgtatgtgtcaaggaatttatccatttcttctagattttctagtttatttgcgtagaggtgtttgtagtattctctgatggtagtttgtatttctgtgggatcggtggtgatatcccctttatcattttttattgcgtctatttgattcttctctctttttttctttattagtcttgctagcggtctatcaattttgttgatcctttcaaaaaaccagctcctggattcattaattttttgaagggttttttgtgtctctatttctttaagttctgctctgattttagttatttcttgccttctgctagcttttgaatgtgtttgctcttgcttttctagttcttttaattgtgatgttagggtgtcaattttacatctttcctgctttctcttgtgggcatttagtgctataaatttccctctacacactgctttgaatgcgtcccagagattctggtatgttgtgtctttgttcttgttggtttcaaagaacatctttatttctgccttcatttcgttatatacccagtagtcattcaggagcaggttgttcagtttccatgtagttgagcagttttgagtgagattcttaatcctgagttctagtttgattgcactgtggtctgagagatagtttgttataatttctgttcttttacatttgctgaggagagctttacttccaagtatgtggtcaattttggaataggtatggtgtggtgctgaaaaaaatgtatattctgttgatttggggtggtgagttctgtagatgtctattaggtctgcttggtgcagagctgagttcaattcctgggtatccttgttgactttctgtctcattgatctgtctaatgttgacagtggggtgttaaagtctcccattattaatgtgtgggagtctaagtctctttgtaggtcactcaggacttgcttaatgaatctgggtgctcctgtattgggtgcatatatatttaggatagttagctcttcttgttgaattgatccctttaccattatgtaatggccttctttgtctcttttgatctttgttggtttaaagtctgttttatcagagactaggattgcaacccctgcttttttttttttccattttcttggtagatcttcctccatccttttattttgagcctatgtgtgtctctgcacatgagatgggtttcctgaatacagcacactgatgggtcttgactctttatccaatttgccagtctgtgtcttttaattggagcatttagtccatttacatttaaagttaatagtgttatgtgcgaatttgatcctgtcattatgatgttagctggttattttgctcgttagttgatgcagtttcttcctagtctcgatggtctttacattttggcatgattttgcagcggctggtaccggttgttcctttccatgtttagtgcttccttcaggagctcttttacagcaggcctggtggtgacaaaatctctcagcatttgcttgtctgtaaagtattttatttctccttcacttatgaagcttagtttggctggatatgaaattctgggttgaaaattcttttctttaagaatgttgaatattggcccccactctcttctggcttgtagggtttctgccgagagatctgctgttagtctgatgggcttccctttgaggttaacccgacctttctctctggctgcccttgacattttttccttcatttcagctttggtgaatctgacaattatgtgtcttggagttgctcttctcgaggagtatctttgtggctttctctgtatttcctgaatctgaacgttggcctgccttgctagattggggaaattctcctggataatatcctgcagagtgttttccaacttggttccattctccccatcactttcaggtacaccaatcagacgtagatttggtcttttcacatagtcccatatttcttggaggctttgctcgtttctttttattcttttttctctaaactttccttctcggttcatttcattcatttcatcttccattgctgataccctttcttccagttgatcgcatcggctcctgaggcttctgcattcttcacgtagttctcgagccttggttttcagctccatcagctcctttaagcacttctctgtattggttattctagttatacattattctaaatttttttcaaagttttcaacttctttgcctttggtttgaatgtcctcccgtagctcagagtaatttgatcgtctgaagctttcttctctcagctcgtcaaagtcattctccgtccagctttgttccgttgctggtgaggagctgcgttcctttggaggaggagaggcgctctgatttttagagtttccagtttttctgttctgttttttccccatctttgtggttttatctacttttggtctttgatgctggtgatgtacagatgggtttttggtgtggatgtcctttttgtttgttagttttccttctaacagacaggaccctcagctgcaggtctggtggagtaccctgcagtgtgaggtgtcagtgtgcccctgctggagggtgcctcccagttaggctgctcgggggtcaggggtcagggacccacttgagggggcagtctgcctgttctcagatctccagctgcgtactgggagaaccactgctctcttcaaagctgtcagacagggacatttaagtctgcagaggttattgctgtctttttgtttgtctgtgccctgcccccagaggtggagcctacagaggcaggcaggcctccttgagctgtggtgggctccacccagttcgagcttcccggctgctttgtttacctaagcaagcctgggcaatggtgggcgcccctcccccagccttgctgccgccttgcagtttgatctcagactgctgtgctagcaatcagcgagactccatcgggtaggaccctccgagccaggtgcgggatataatctcgtggtgcgccattttttaagcctgtcggaaaagcgcagtattccggtgggagtgacccgattttccaggtgccgtccgtcacccctttctttgattaggaaagggaactccctgaccccttgcgcttcctgagtgaggcaatgcctcgccctgcttcggctcgtgcacggtgcacacacccactgacctgcgcccactgtctggcacttcctagtgagatgaacccggtacctcagatggaaatgcagaaatcacccgtcttctgcgtcgctcacgctgggagctgtagaccagagctgttcctattcggccgtcttggctcctcctcctttttttttaagattgagttttgctcttgttgcccagactggactggagtacagtggcggggtctcagctcactgcaacctctgcctcctgggttcaagtgattctcctgcctcagcttcctgagtagctccaattacaggcacccgccaccacacccagataatattttgtatttttagtagagatggggttttattatgttggctaggctggtctcgaactcctgacctcaggtgatccacccaccttggtctcccaaagtgctgggattacaggcgtgagccaccatgcctggccggttctcagggctttttacctgtatccctcagagcttaagatcaattctacaaaggcttctgaagctaagactttcactctttatcctgggactcattatttaccttatagttcactgttctgtgctaaaactatagtatgctgtttgcataaatattaatactgtactaaaactatagatgagaatactaatgcctttgtcatgcaagccttcgaaccccaacccagcctatgtgagcatgctcagatggctgcaaagtggttccactcacactttggggtaagcacctacccccactacatcccctgtcagcaggaagaagttaaagtggtcttcatcctttttccatccttatagcccacaccttaagaataaggtgttatgaaacccaaagggagagattgaaactacctttacaaaaattataaatgagacagttagtacagtgaaaagagatctgacgtgactccaccttactttttttttttttttttgagacagagtcttactctgtcgccagggctggagtgcagtggtatgatctcagctcactgcaacctctgcctcccaagttcaagagattctcctgcctcagcctcccaagtagctgagaatacaggcacccgccactaagcccagctgattttttgtatttttagtagaggcggggtttcaccatgttggccaggctggtctcgaactcctgacctcgtgatttgcccacctcagcctcccaaagtgctgggattacaggcgtgagccaccacacccggccggctccatcttgcttctaacctccaagctgtccttgttcattcctgggcataggccaaactaaccttgggagggaatttagcttatagtttaactctgaaacgaaattgaagatagcccttccccctccgccccccaaaaaattttgctcttggactgttggcatatttctgaatgctttcaggtcccagtgtaatcccagcactttgcgaggcctagccagaaagatcacgttagctcaggagttccaaaccagtttaggcaacatagggagtcctcatctctacaaaaaaaaaaataataaaattagccaggagtggtggtgaatacctgtagtctcagctactggggaggttgaagtgagaggatcgcttgagcccaggagttggaggctacagtgagccatgatggcatcactgtactccagcctgggcaacagagtgagatctttcccaaacacacaacaaacaaagcataacagttttttatttttttgagacacagtttcactctttttgcccaggctggaatgcagtggcgtgatcttggctcactgcaaccttcacctcctgggttcaagtgattctcctacctcagccgccctagtagctgggattacacgtgcacgccaccacacctggctaatttggtatttttagtagagatggggtttcaccatgttggccaggctggtctcaaacttctgacctcaggtgatccacctgcctcagcctccccacgcactgggattacaggcatgatccaccgtgccttcggggaggccaggatttgaacctttatcttcctggtccttcttgcctagggctcagcagtaaaagcctttctttctagcccatcaaacctcagtgtaaatatctagttttcctgggcaacatgagtggacctcagttctgttctacttttttttttttttttttttttgagcaagacactcagtcacccaggctggagtgaaatgacacaatcacagctcactgcaacctccacctcctgggttcaaggaattcttgtgcctcatcctcctgagtagctgaggctacaggtgtctgccactatgcccagctaattttttttttgtatttttaatagagatggggtttcatcatgttgcccaggctgcctcctgagctcaggcaatccacccaggttggcctctcagtgtgctaagattataggcatgagccaccgcacctgacccacatttctttataatagtgaatttctttataattgtgaattccagtatgctttggcgaaaagggttttttttttttgttttttttttttgagaaggagtcttgctctgtcgcccgggctggagtgcagttgcgtgatcttggctcactacaagctccacctcccaggttcacgcaattctgctgcctcagcctcccaaatagctgggactacaggtgcctgccatcatgcccggctaatttttttgtatttttttttagtagagatggggtttcatcatgttagccagcatggtcttgatctcctgacctcgtgatccacccatctcggcctcccaaagtgttgggattacaggtgtgagccaccgtgcccaccccggtaaagggtcttaaaatgtatcttcccttgctgcagaagctattttgaagtgccatatttttcattaagcattaagtagagaacatcaggataaattagtaggatcatcagtattacatgaaacattagattgctgaatgaattgcataatttaactagaaacactttattctcaagtagaaaagttgtttgctttggagaatttaatcatctgttacttgttcataaatattcccccgaagggctctgacctctccctccagtgtgagcctaattcctaaaactgaataattatttgctgctgcctgtttcacaaacacacatggatgggtcagatgtgtctccttttcctcaaccttatatgaaggaaggagcatctgagcacagcacagaaatgatccaaaccaagctactgtgaagtgtaaagagagcagcatggcttttccaaacaggacagcatcacaaaccctcccaagggtacaaggagagcagttagaacagaaggaaaggtgacccgcagactgttaggactggtgaaaatgattcattgaaaatctaagaaagaactcttgtctttggagccctgtgcccatttctctggagtgtgtcttttcctgaatggccattcccagcttttcacttgaataaactcttcacaactcagtcctacgtttttgcatgatgtgaggttgacgggacacacacccaatacccatggactctatgctccctgccaccaccttcctcttccctcctggcctgcacaaatgtccaggatccaacccttcactctgaatcccccaaactccctgactggacccagtcatgctggatccctcagcagacccatacaacttagaaactctcccctgtcccccaaacctggcttgactctcgtgccctcctcaggcacctttaccctcagcttgaactggcctcagccatgatttgaacttcaccctgtgctccttcatgctccacacctacctccctcaggtgccattgcccccagcagtcctggacctaaggacatcaccatgtctccggcattgcatcctgggagccctcaccttttcccacctctccctggcctttaaagtcattgctgctgtgagacccagaccaccattttgttccagtagccccctgcccacccattctccctctgtgacttctctgcgctgcccagcagatgccattgtatcccagccacggatttctcaactgccattaccaccaactggaagtctttttatttatttatttaatttttataacagagtctcactatgttgcccaggctggtcttgaactcctgggcttaagcagtccccccacctcagcctcctaaagcctggggttatggggtgtctatgcagtgagcccttccatgcacttgaagttgtgaagaacatctaaagactttaccacattggttacatttatagggtttctctccagtgtgagtccttccatgccttcgaaggtttgagggacatccaaaagctttcccacattgcttacatttatacggtttctctccagtgtgagtccttccatgcatttgaagtcgcgaggcacatccaaaagacttcccacactgcttacattcatagggtttctctccagtgtgagtccttccatgcatttgaaggtgtgaggcagatccaaaggctttcccacactgcttacattcataaggtttctctccagtgtgagtccttccatgaatttgaagctgtgaggcagatctgaaggcttttccacattgcttgcattcatagggtttctctccagtgtgagtccttccatgatatcgaaaggagctcgaacagttgaaggatctgccacactgcttgcattcataggtttttcctccagtgtgagtcctttcatgtctatgaaataaactgggcaaactgaatgttttcccataacccttacattcatacggcttctcttctctgtgcatcctttcatgtatttgaaagaaagagaaattactaaatggttttccacattccttacatgcatagggtttctctcccgtgtgagtcctaccatgtgtttgaaggagtgaggcagatctgaaggctttcccacattgcttacactcgtaaggtttctctccagtgtgagttctttcatgatatcggaaggaactggaagaattaaaggctttaccacattggttgcatttatagggtttctctccagtgtgagttttttcatgtgtttgaagtgaactgggagaataaaaggctttcccacatatcttacatttatgagatatctctccagtgtgcattcccaagtggttttgaaagctggtaagataagataatactttcccacaatgtttacattcatagggttttttcctagagtgggttctttcatgtctgcgaacagaactgggacacttgaatgcttttccacattccttacattcatatggcttctcccccgtgtgagttctttcatgtatttgaaaggaatgggaagagctgaaggctttcccacactgtttacattcatatggcttctccccagtgtgagttcttttatgagcatgaaggcatgtggaactatggaatgctttcccacattcattacatttataaggcttctccccagtgtgagttctttcatgtattcgaaggctactagaatgactaaaggctttaccacactgtttacattgatatggtttctctccagtgtgagttcgtttgtggataagatacaaactgagaaacatcaaggctttcccacaaaatttacacttataaggtccatctccacggtgcattatcctgtgtctttgaaggtttgaatgggaaataaatgtttttccgcattcctcacaaacatagagtttccttccactatgagccctttcatgtgtctgaacagaggagagacagttgaaaggttttttacagtatttacatttatatggtttctgtccatattcttgatactcatatgccttgtgtccagtgtcatctctgatgtgcctattaagagatgaatgagcactgcctacttctccatacacactgctttcgcatgattttactccagtagttgttttcttcagcatgtcatctggaacctgggtcaaaatttctccatgctgatgaccttctttactttcaaagagtctctctcccacaattctgtgaacaataagaagtacattataatgggtttgattatcagtgattttatattcattcacaagtattgcacttgcattttttctcttttttttgagatggagtctcactctcttgcccaggctggagtgtagtggtgcgatcttcgcttactgcaacttccacctcctgagttcaagcaattttcctgcctcagcctcataagtagctgggactacaggtgcataccaccacacccagctaattttttgtattttagtagacggggtttcaccatgttggccagactggtcttgaactcctgacctcaggtgatccacctgcctcggcttcccaaaatgctgggattacaggcatgagccactgtgcctggcctgcacttccatttttaacatcatccagcaaactgtaggctttctgccctgtctgaattgtttgaatatgaacggaccacaggctctacaagatggcccagccatatctattatcaaaaaagatgatagaaggcttctgaatactgttttttggttttttttgttttgttttgtttttttgagatggagactcactctgttgcccaggctggaatgcagtggggcaaacttggctcactgcaacctccccctcctgggttcaagcgattctcctgcctcagcctcccaggtagctgggataacaggtgtccaccacgatgcctggctaatttttatatttttagtagagatggggtttcactatgttggccaggctgcttttgaactcctgacctcaagtgacccaccctcctcggccttccaaagtgctgggattacaggcgtgagccaccacgcctggcgtctctgagtactattttaaagtaaactattttacaaatactaaatatctgtctttttaaatttgttttttgggtcagggtctcacactcttgcccaggctggagtgcagtgatgccatcatgacttagtatggccccaacctcctgggctcaagtgatcctccagcctgaacctcccaaagggctgaaatatagtcctgggccattgtgtcaagcctacatcacacttcaatatgtgtttagagaaaattttctaagaataaatagattgaaattgtgcttatttcttttgtttcctttttttttttttaacattttctcccattctaagattttctagagacacacgtctttgtcatgtgagtgcaagttaccttaggtttctccttagattttcgtactctacatatatgttctggggtttccattttttccctacaacacacaacaaggaaaataatcttgaattagtataaaattattaaaaaattacatgattctatgttcatggtacactgcaagcatgcttcctttatttatcaaatattccctgtccacattgtaaatcactcaacagcatacatgagctaaaaatacttgttctcagaaaaaaaaaaaaacttgttgtctcatttactgaaggaagtaatgttgtcacccttacctatagaggccaggttcctgaaggtttcttgcatcacatctctacagagatttttctgggaaggatccagcaaagcccactcctcttgggtgaaggtcacagccacatcctcaaaggccactgaatcctgaaacatctcacatgtatagaggaggatggataagactaacatcactgggaagcctatactctattcccaagaggtttccatgatgctgtggactcaaaacaattattccatgaccatcagacctcatactctctgtctacactcagtttcttccataaagtaattctgaggctacaactgaaccatgtggtaaagcaacagtagaataggaaaatgtgtatttttggtaaatccagaaaggtgtgctgcctgggctgcccctaatgtttgtttgtaaagtgggagtacggcacctgccataacaaagtcttccaaattcctgtgcagaaaaagttaacattagcagtcctgaggctgcatatccttgaaaaaaaaatgcctatcgacaaagtttaacctttgatgttatctagaaaatgaattttgttctgagtgctgcagcagaaacaaaaaccaaaaaactggattttacaaggggtcttatcaatctaaatgatgagtcataaataactaaaacaaaaactcatgagctctacactcatgagctcatgccactgcactgcagcctgggcaacagagtgagactcggtctcaaaaaaataaaattagccaggtatggtggtgcgtgcctgtaatcccagctacccaggaggctgaggcaggagaatcgcgggaatccaagaggcagaggctgcagtgagccaagatcacaccaccacactccagcctgagtgacagagcaagactccatcttaataaaaaaaaaaaaaaaaaaaaaaaaatttccaggcacctagtctcaacaaaaaggcaaacatttatcaaacttttaaaaacttttgtggccaggcatggtggctcatgcctgtaaccccaccactttggaaggctgaggcaggtggatcacctgaggccaggagttggtgaccagcctggccaacatggtgaaacaccgtctctactaaaaatacaaaaataagccaggcatggtggtatgcacctgcaattccactacttgggaggctggggcaggagaatcacttgaacccagaagttggaggttgcagtgagctgagatcatgccactgcactccagcttgggcaacagcaagactccatcacaaaaaaaccacttttgtgcatgagatgacaccatcaacaaagggaaaagggactccttgtgctctgtttaaaggataataaatggctcagcttctatggaaacagtacagtagtgcctaaaaaaataaaattactgtattttcctgtatcccacttttgggtctagttatattaaatttgaaaaaattgaaaactgaaccttgaagacatatttgaaaaccactcttcacaaaatcaaagagccagatcaatccacatgtccattgatggctgcatgcataatgaaaatatgctaggcatatatatacattgaaatattaatcttataacatcctgtctcatgctacaacaatcacaaaacttcaggatactatggtaattgcaaaaagctaggcacaaaaagaaaattacagtataattcaccttagatgagttatgtagtgttgtgcaactatacacttaaaactgcttaagctggtaaaattgaagtttattattttacaataattaaaaataataaatcacagtaccaagtaaaaaaactaattgatattgattaaaagatgggcataggccaggtatggtggctcacacctgtaatcttagcactttgggagtccgaggtgggcggatgacttgaggtcaggggttcaggaccagcctggccaaaatggtgaaaccccatctctactaaaaatacaaaaattagccgggcatgatggcacattcctgtaatcccagctactcaagaggctgaggcaggagaatcacttgaatctgggcagcagaggctgcagtgagccgagattgtgccactgcactccagccagggcaagagagcaagactctgtctcaaaaaaattttaaaaaaaaaaagcaaaagtatttgaatgacatttctgcaatacatagaaatgaccaataagtatatgaagtggtgctcaacatcaggagtcaacaggcataagtattttacacagtgtagtttcaggtggttattgagcactttctctcatgaaaagtattcataaaataataaaattttaaatatagccatttattaaagtaaaaaataataatttaaatactgcagctgtttcaagtgtatcatgagaaacacataattgaagacgtcctttcgagagaggagtgagtgttttggaatgtatcgaggaaagcagaaatttagggatttattgtcattcctaagaagagctggctgagcgcggtggctcacgcctgtaatcccagcactttgggaggcagaggtggccggatcacctggggtcaggagttcgagaccagactgattaacatggtgaaaccctgtctctactaaaaacacaaaaattagctgagtgtagtgatgcgcgctactgggaaggctgaggcaggagaatcgcttgaaccagggaggcggaggttgctgtgagccgacattgcgccattgcactccagcctgggcgacagagcgagactctgtctcaaaaacaaaaatataaaaaaaaaaaaacagcactaagctacaggggtcttaaggactcctgctttactgtttttttttttttctttttttttgagacagagtagtctcactctgccacccgggctggagagcagtagcacaatctcagctcactgcaacctctgcctccaggttcaagcaattctcctgcctcagcttcccaagtagctgggattacaggcacccaccactatacccggctaatttttttgtatttttagtagagacgggggtttcaccatgttggccaagctggtctcaaactcctgacctcgtgattcacccacctcagcctcccaaagtgctgggattacagctgtgagccactgcacctggccaggactccttctttgaccaaacttgatctcacagccctcttcttgtctaggctttggccttcttctgcagagcccagttatagcaaaaagccttttaaggcagtgcacagagaatctctcccaccaaaacttagtatttccaatcaagttcaatttccctcactcatgataatccatcaactttctcttccctaactgctgacacttcaccaagttccatcctttccctcgccttgccctgtaatataggagagagattaaactcagggagacagcctattacgtgtcgtgagaactgtaatataatatacagaactgtaatctccatattatagttctcatgacacatattacaattgtgctgaataaagccttccttgatattttaaacacattttcaatacaatctctctttataagagatagggacttagactggagactctgcttcagaaatctagaatgcataagggataataggctctctccctgtggggagacagctgagactacctcccactcacaaaaccaaaacaccaggtcagatttctctcctgaagaccactccctgctgttatcccataaacttagtaagataggggactgtgggtgcactatttcccagacagggtactagggtagagcttacctcctgcagtgatgatgcaggatgcctggcggtactggctgccaattcaaccgtcacgctgtgatagagacttaggtgttgggaacaggcccccaaatctggccataaactggctccaaaactggccataaacaaaatctctgcagcactgtgacatgttcgtgatggccatgacacccacaatgaagactgttggtttaccggaatgaaggcagggaacacctggcccacccagggtagaaaaccacttaaaggtgttcctaaaccacaaacaatagcgtaagtgatctctgccttaaggacgtgttcctgctgcagataactagccagagcccatccctttgtttcagcccatccctttgtttcccaaaaggaatacttttaatctataatctacagaaacaatgcttatcactggcttgctgtcagtaaatatgtgggtaaatttctgttcgtggctctcagctctgaaggctgtcagccccctgatttgccactccacactccatatttctctgtgtgtgtctttaattcctctagtgcccctgggttagggtctccatgaccgagatggtcttggcaagtggtgtacatgtgtgggtcttgaacccaggtcaaagtgtcaccggagtaacagttggagaatgtggaactaagctggaggacacccgagtactctaaagcaatgcccgtggtaagaaggggagcttggaagcatcagggtaacaaagggacaagtgtgggctctggttccttccatcttgtaaccttttcacactgatgaggaggaggaaggaaagtaacagaagagatgacagagcaggtttgtttgccagctaaagctaaagtggcaaaggaggaagagtccatccctacccttctgcaccccctccttattttgaagaaaaagagtggcctgacccaccagatctttcttttctggaggacactggacaaaaagtagtttccccaatgagtgttcgagcagcaccttgagcaatggctctcagttctattcaggcaggaattcaccaagctacaagagagggtgatatagaggcttggcagttccctgttaggatacaccccccagatcaacaggaaaatactatagctacatttgagccttttccttttaaatttgggaaacaccatgaggggcctgtcccgggccccattccaaaccaaggcatttccggctgaggccattccctaacccttgtacaatatctatcccccaccacagccagtagtgccacggtagatttatgctgcacaaaagctgtgagtcttctgcctggggaacccccacaaaaagttccaacaggggtctgtggacacttgccagtagggacaatcagattacttctaggtagatctagtttaaatttaaaaggagtgcaagtacatacaggagtcactgattcagattacaatgggaaattcaaattgttatagctacttctgttccctggaaagcagagccaggaaagcacaactcctgattgtgccatatgtggaaatggggaaaagtgaaattaaacgaacaggaggatttggaagcacaaataaacaaggcaaagcagcttactgggtgaatcaaagtattgataaatgtcctacctgtgaaataactattcagggaaagaaatttaaaggattggtagatacaggagcagacatttccatcatttctctacaccactggctgtccgcatggccaattcaacccactcaatttaacagagttggagttggtaaagcccctgaagtatatcaaagaatctgtattttgcattgtgaagggcccaatggacaacctgggactattcgatcaattgtaacttctgtacctataaattaatgggggagagattttactgcaacaatggggagtacaagttctaattccagagcaattatatagccctgaaagtcaacatatgatgcatgaaatggggtatgtcctaggaaaaaaattgcagggtttgaaggaactgctccaagcagaaagacaaagttcccaccaaggtttagggtatcatttttgatggtggccattgttaagcctccagaaactatacctttaaaatggttaacagataagccaatttggatagaacaatggccgctaagtaaagaaaaactggaggctttaggggacttagttactgaacaattagaaaaaggacacatagctccaacatttcccccttggaattctccagtcttcgtaattaagaaaacatcaggtaaacggagaatgttaactgacttaagagccattaattcagttatataacctatggggacattacagccaggactgccttctcctgtggattccaaaaaattggcctttaattgtcatagatttaaaagactgtttctttactatccctttagctgagcaagactgtgaacggtttgcatttacaattcctgcaataaacaacctgcagcctgctaagcattttcactggaaagtgttgccataaggcgtgttaaacagtccaacaatttgccagacttatcaattgaaaacattaaatgactttcaaaaagtactaagggatatcaactggatacaacctgctctaggcattcctacctatgctatgagtaatctgttttctatccttagaggagatcctagtctcactaggcaattaacaaaagaagctgaggcagaggtacagctgattgaaaagtaagtccataaagctcagataaatagaatagatccagagaagactctagatttgctaattttttcaactcagcattcacctactggtgttattgtccaagagcaggacttagtagaatggctttttcttccacatactaactcatggactcttaactccttatctggatcaaatcgctactatgataggaaatgggagaactcggattgttaaattacatggatatgatcctggaaaaattattgtccctctcacaaagacacaaatacagcaagcttttataaacagtcttacttggcaaacccattagctgactttgtgggtattctcgataatcattttcctaaaagaaaactatttcaatttttgaaattaactaattggattctccctaaaataactaaatttaaaccaattgaaggtactgaaaatgtcttcacagatgggtctagtaatggtaaagcttcttattccagcttgaaaggtaaagtttttcagaagccctgtacttcggctcaaaaagcaagagcttgtagctgtaagtgaggtattgactgcttttgatatgcctattaatgtgatttctgattctttgtatgtggttcattccacaccattagctgaaaatgctcagttgccatttcatacagatgaacaactgatgactttatttacccaattgcaaacagcagttagaaatagaatacaccctttttacatcactcacactagggctcatacacctcttccaggacctttaactgaagggaatcaaatggctgatggcctagttgctactacaatatctaatgccagacactttcacaatttaacccatgttaatgcctctggtctcaaatgcagatacagcattacctggaaagaagctaaagctattattcagtgatgcccaacttgccaaatggtgcattcctcatcttttataggaggagttaatcctcaaggattggaacctaattctctttggcaaatggatgtcacacatgttccctcgtttgggagactagcttatgtacatgtatgtgtggacaccttttctcagtctgactgggttacatgccaaacaggagagtcttctgcctgtgttaaacgtcaccttttgcagtgttttgcagtgatgggcattccagcttctattaaaacagataatgccccaggctatactagccaagctctagctacatttttctccatatggaatattaaacacattattggcattccatacaattctcaaggatgagccacagtggaaagaatgaatctgtccctgaaacagcagttgcaaaagcaaaaagggggaaacagggactacaggacaccccatatgcaactgaatctagaattattgactttaaattttttgagcctgcctaaaggccagatgctatcagcagctgaacaatatctacagaaaccagctgcaaagacagaagcagaacaactggtttggtggagagatctgataacaaaaagttgggaaataggtaaaataataacttggggtagaggttatgcttgtgtttccccaggatgaaatcaacagccaatctgggtgccattgagacatctaaagccttactatgagccagatacccaggaagaggttttgggaggatcccaaagactccctggttgcagccatgtcaagactgatgctgaggaggaccccaactgtcacgagcaacaactgcctggggacagatcaagaagctgtcacagatggcagagaaaaacctgagaaaagcgggacaaccagtcacaatgagtaatttaatgatagctatgacagtggtgatcaccattgccatgagtattccttcaacaagggctgacacagagaacaattacacttattgggcatatttatcaatcttggctggcaataatgcctggatgtgatcactctatgacacagttacacatgctttctggtctcagtatttaccataataatctgctcctataattgaggcatactgccctcaaaaaactatttgtaaacaggattggacctggtcagaaaaaatgaacgtacttgtttgggaagattgcattgcagaacaggcagaggtgctgcacaacgattcctatggagtcattattgattgttcccctaaggggatgtttagcttgaattgcacctctcagtctgcctgccatggccacactatgttcagctggtctgaacaaaatggtcagatggtagaaatgataagaagtatggcaagagttcctattatctggaaacatggtggtatagtggcacctcaacctcaaatgatatggcctgctgtaggagctaaacataaggatttgtggaaactattaatggctcttaataagatcaaaatttgggaaaggataaaaaagcatctagaaggacactctagaaacttggatattgcaaaattaaaagaacaaatatttaaagcatcccaggcacacctgaccttaatgccaggaactggagtgcttgaaggagctgcagatggattagcagctattaacccattaaaatagataaaaacacttggaggctctgtgatttcaatgatgattgtgcttttaatctgtgttgtctttgtatagtctgcagatgtggatcccaactcctgcgagatgtagctcaccatgataaagccacctttgcttttattgtcttgcaaaaacaaaaagggggaacatgttggggacaggctcccaaatctggccataaacaaaatctctgcagcactgtgacatgttcatgatggctatgatgcccacactgaaggttgttcatttactggaatgagggcaaggaacacctggcccacccagggcggaaaactgcttaaaggtgttcctaacccacaaacaatagtatgagcaatctgggccttaaggacatgttcctgctgcagataactagccagagcccatccctttgtttcacataaggaatatttttagttaatctataatctacagaaacaatgcatatcactggcttgctgtcaataaatgtgggtaaatctcttttcatggctttcagctctgaaggccgtcagccccgatttgccactccacattctattatttctctgagtgtgtctttaattcctctagcaccactgggttagggtctccatgaccaagctggtcttggcacttaggcttcagctgatatagatatatgtcaggaccaggtatagaatttgcatgtctttcttccatttggtgaattctcttgcaatttctgttttttaaggctatagcaaccagtattcccaggaattctacaaaccatgtactaacctggcctgaacctgcttagctgctaagatcaggtgcattcagagtggcatgaccatatactcttttatctttttttgtttttttcaattttgtttttttgagacagggtctcactctgtcacttagtctggagtgcagtggtatgatcatatttcactgtggcttcaatcacctgggctcaagtgatcctcccaccacagcctccccagtacataggactgaagtaccataggaagaactgtgacctaagaaaaaacaagtgggacccatgtagattatctgctcaatgttatggtcaaatgactactgctataaaaaacaaaatccattaatcaagaaagtgaactaccattccatggaaggttcgttactaagtaaaaataaaatatgatataaaatatcacatatctgatatcaactgcataaaaaaatgtaaaaataaaatatactgatagggatgcatacccaggttatgaaactatgaagaaaataagaaaacaataattatcattcgcaatactggctccatcaatattttggttcactgtgaaattgttttatgtgttttgaccatatgtaatatttttagtttctagagtggaaactctgtgcagaaataactatcagtgcacatggaaataccagcaacaacctactgaatataatttttaaaaagacaacatagcctgttaaacaaatttgtattacagttaattttctttttaaaaatgtttttattatttttgttttgtttagggacaggttcttgcactgtcacccatgctatggtgcaggggcatgatgacagctcactgtagccttgacttcccaggctcaagctatccctaccttcctgagtagatgataatacaggctcctgccaccacacatggtgaatttcttaatttttgtgaagacggggtctctttatgttgtccaggttggtctcaaactcccgggctcaagccattctcccaccttggcctccaaaagcaattaattttcttgaagtcccaaaaagtctcagaaaggatataaaattattattatccaaaaagtacccatggaaagatatcaatggaaaatgtaataaatgtaaagatgtcatatgtccttaaacacacactgattatcactgtgatgtaatctctctgaaatacatctagtattttattatattccatgaaatgcataggcaggtttgttttttcattaaaattaagaaaaactacttctaaacactgaaatagaagacaatgactaagaatagccagcataagctgggtgtggtagctcacacctgtaatcccagcactttgggaggtggaggtgggcgcatcacctgaggtcaggagttcaagaccagcctagccaacatggtgaaacccctctctactaaaaatacaaaaattagcctggcatggtggcatgtgcctgtagtcccagctactcgggaggctgaggcagggagaattacttgaacccgggaggcggaagttgcagtgagctgagattgcaccactgcactccagcctcggtgacagagcaagactctgtctcaaaaaaaaaaaaaaaaaaaaaaaaaaaagccaggatgttgtataaaatatgactaagggatgttaatgacataaatgtttgcattttcccactccaaatcatacagtgacaccctaacctgtaatacgatggaattaagatggcatctctgagaagtcattagaattagattagagcatgagagtagatccctcgtgaatgggattagtactcttatgagacacaggatagcttgtttcctctttctctctgtcatgtgaaaaaataaaaaaatagctggccgggcgcggtggctcacacatgtaatcccagcactttgggagcctgaggtgggtggatcacgaggtcaggagtttgagaccagcctggccaagatggtgaaaccctgcctctactaaagaatacaaaaaattagctgggcacggtagcaggcacctgtaatcccagctactcggaaggctgaggcaggagaattgcttgaatcccagaggcagaggttgcagtaagccgagatcgcaccactgcactccagcctgggtgacagagcaagactccatctcaaaaaaaaaaaaaaaaaaaaaaaaatagccatctgcaaaccaggaagcaggctcttaccaggcaccagatctgtcagcaccttgaacatggacttcataacttccaggcttccagaactgtcagaaagaaatgtttatttttttatttttttatttttttgagacggagtctcaccgtcaccaggatggagtgcagtggcatgatctcagcttactgcaacctctgcctcccaggttgaagtgatcctcctacctcagcctcctgagtagctgggactacaggtgcgcatcaccaagcccagctaattttttctatttttagtagagacaggctttcaccatgttggccaggatagtctcgatctcttgacctcgtgatccacctgcctcagcctcccaaagtgctgggattacaggcgtgagccaccatgcccggcctagaaattattctttaagtcacccggtttatgggaatttgatataaaagcccaagatgactaagatagataggcactagccctagaatacatcacagctttgagatctatactaataaagagaaaatgatattaacagagagatggaaatatagaccaatggagagggtccatgggtacaaaaacacagaaaaaatgaataagactaagcatttgcaagcacaacaggttgactatagtaaaaaataatatattgtacattttgaaataactaaaagagctgggcatactggcttatgcctgtaatcccagcacttttggaggtggaggcaggattacttgagctcaggaattcgagacaagcctgagcaacatggtgaaaccccgtctctatgaaaaatacaaaaattagctgggtgtggtggaaaacacctgtagttctagctatttgggaagctgaagcaggaagatcacttgaacctgggaggtgggggttgcagtggtgtggctggctcacgcctgtactcccagcactttgggaggctgaggtgggcagatcacgaggtcaagagattgagaccattctggccaacacggtgaaaccccgtctctactaaaaatacaaaaattagctggatgtggtagtgcgtgcctgtagtcccagctacttgggaggctgaggcaggagatttgcttgaacccaggaggcggaggttgcagtgagcagagattgcgccactgcactccagcttgttgatagagtgagactccatctcaaaaaaaaaaaaaaaacaaaacaaaaaaaaaaacaaagcagctgaccaacattcatgttaaaatagatatcaagccaggcacagtggctcacacctgtaatcccagcactttgggatgccaagaaggggcggatcacttgatgtcaggaattcaagatcagcctagccagcatggcgaaaccccttctcaactaaaaaaaatacaaaaattagctgggcgtggtggcagtcaccagctactcaggaggctaaggcacaagaatcgcttggacccaggaggtggaggttgcagtgagccaagatcgtgccactgcactccagcctaggcaacacagtgagactctgtctaaaaaataaagtaatatcaaaagacaaaacagactctttgtggaaataagacacgaaatcttggcaatacaggaagacctcatccctacaaaaaataactagctgggcagagtggcatgcacctgtgagcccagctactcgggaggctcacgatgattgcttgagcccaggaggtcaaggctgtagtgagctgtgatcacaccagtacactccagcctgggtgacagcaagaccctttaaaaaaaaaaaaaaaaagtcctccatcctgcaaagaactgttttttttttttctttctctttttctttttttttttttgagatggagtttcaccgttgcccagtctggagtgcagtggcgcaatctcggctcaccgcaacctctgcctcccaggttcaaccagttctcctgcctcagcctcccgagtagctgggactacaggcttgtgccaccatgcccggctttttttttgtatttttagtagagacagggtttcaccatgttggccaggatggtctcgatctcctgacttggtgatctgtgcgcctcgacctcccaaagtgttgggattacaggcgtgagccaccacgcctggccagaactgatattttgggtactctttgtaattcaccaatctaccatactttcttgtggaaattatttcatttttctccagttaaaatagtaaactttccctatttttctccagtagcattcctaaaactagtccctataacatcattggaaatcacccacaacaaaaggatacacctgagaaatgtactacactgcccgcagagaagaaaaaaacatattaagaaatggaatataagactaaatagcgattttttttttttttttgagatggagactcgccctgtagtgcaggctggaatacagtggtgcaatgtcagctcactgcagcctccacctcccaggttcaagggattctcgtgcctcagtctccctagtagttgggattataggcatgcaccactatactcagctaacttttgtattcttagttgaaacagggtttcatcatgttggccaggttggtcttgaactcctgacctcaggtgatccacctgccttggcctctcaaagtgctgggattacaggtgtgagccactgcatccagccatttttctgaaatctacctctttctggcctgtgtgtaaaattttcttattttgcaaggtctagtgaaaaatgcaaattacaattaataaaaaacctgaagctgcaataagtgaacaattatttacaaaaagacaaacccacagaggggcaatgctgactagaaagaacacagtgatgtttgactcaagtgtcaggccatcctatcacatgggacatttctctgtgcccatcctgctcactgaagtgctgagtgactattttccaacaacactgcactgtgcccctgtgtgccccaagtgcatttccttttttttttttcccctctcttgagacagagtctcactcacttgcccaggctggagtgcagtggtgcgatgtccgctcattgcagaatccacctcccaggtccaagcaattctcaggcctcagcctctggagtagctgggactacaggtgtgtgccatcacacctggctgatttcttttgtatttctagtagagccaaggtttcaccatattggccaggctggtctcaaactcctggcctcaagtgatctacccacctcaacctcccaaagtgttgggattataggcatgagccactgcacctggccagtgcattttcatttacgaggctgaggcaggagaatggcatgaacccgggaggtggagcttgcagtgagcagagattgtgccactacactccagcctgggcgacagagcgagactccgtctcaaaaaaacaaaaacaaaaaacgggccaggcgcagtgactcacacctgtaatcccagcactttgggaggccaaggcgggtggatcacaaggtcaggagatcaagaccatcctggctaacacagtgaaaccccgtctctactaaaaatacaaaaaattagccaggcgtggtgacgggctcctgtagtcccagctacttgggaggctgagtcaggagaatggcgtgaacccgggaggcggagcttgcagtgagtagagatcgcgccactgcactccagcctgggtgacagaacaagactctgtctccaaaaaaaaacaaaaacaaaaacaaatagttgatactacaaattgaagaaggagagttggtgtctgcaaattttagaaaggaactgaaattttagtattgtactgcaagctctccagaggtaggccagggtcacagggtggagggtttgagatctcacttcccatatatttggaaaatgcagagaagtaccagttaactggggagtgttgaaaattttgaataagaagtaattaaacttaatgcctatagtactctaagatcttggccaagaacatggaaatcaaattcaaatgctattcatataaagtactaacttatgtgacggtatgtggcctgagaaaacaataacaagttactaatttattgggaaatgaaatatgggcttaaccaggtacaattggtcgagtaacctctgattatacaaccaaaaattttccactgtatggtctgtgaaaataagtaattcaaaaattgaagctgttggaactctaaattatcttgaagtttaaagtaatgtgactctggaattgagtcacctgacactggaaagagccagctggaaccctcccacacttgactacagattaaccatcagacaggcttcactatacctggacaggcctcattatacccgcttcctttaggagtttccacatagccactgacccaccttcatgttaaaacagacatcagccaactggaaacacagactctctgtgacaataagaaaccaaattacaaacaagacctaaggccatgcaaggcaagaggtaagtcaaatcttagaattcacaaaatctaaagaaacaggtcttttgttttgggtgggatgaaatcatatgacagataccagaccctcttcacttaagcaatccttcctaccgcctcgaagttttagacaaagcttcacactctccaccaacggccaccttcagaatccctcaaccacctgcaccttctaaccccccttccacaggtcccgccctttctgccaaaggaacttacacctttccaggcattgatgcatgattctccctgcaattcctgtctccctgaaatgaataaaaacagtcttgagccgcctcgggaccacttacttcaggcctcctggggttgtgttttcctcagctgaggcctctcctattcggctctgaataaacttctttaagttattttacacagcttggcattttccgttaacaaattacaagccaggactgggtgtttatcattcaggaatctcaaaggaactctaattattaatatattttttaaaacctattctgagaagcaaaactataattgttaacgtgtctcagtttaatttttaagaggagaaaggcgctactggggaccccacagcccaccctcctcctacacaaacccccacacccgaggcgggatccccccatgaccctcgcgtagtccccgcacaatgtggggagacgcggggcagcgggcgcggagctgcccagagagggctctgggaactgggtgacagtcaccgcgcagggacaggacgagacgcccgggtcccggcggccggcccagccccactgtggggccaaggggaccaagggccgagctgtcccacgggaaatcgggtcccagaccccggagtcgccgcggggaggcccgggtcccaccacagccggttccggccggttccaaccagctcctcccccgcctcgggacccctggcccgcacgctcaccatttcttgcctttcaggtgactcccacgaccagtgcgggtcacagcacaggcgacagaagctatggcagaggcacctgaaccctctcggaggggaaagccaggctcccaacctcagctcgccgcctggagccgggaaccgaggagagcagggccttcgccctccccgatggacactcggcaggccccgcccagcgcccctgattggacgaagcgccgggccccgccccctcagccgtgagtgacaatagaagcccttggtaacggggctctgaaaacgggtttgaccggatccagcgatagattctttaagccagaggtctgtaacctttttagcaccagaaccggtttcgtggaagacagttctcctacgggggcagatagtttcggaatgaaacttccacctcagatcaggcattttatcctcataaggcgaacccaacctagatccctcgcatgtgcagctcacaatagggttcgggctcctatgacagactaatgcctctgctgatctgacaggaagcatatctctggcgataatgcccgctggctcgcccgccagccgctcacctcctgctgtgcggactggttccttacaggccatggaccgggggttggggacccctgccatagagtactgttgaatagaaactttagctcgtccggcggtgggctgggggggtgggggtagctcatgcctgtaaccccaccactttgggaagccaaggcaggcagattgcttgagcctaggaacttaagcccagcctgggtaacatagcaaaaccccgcctctacaaaaaatacaaaaattagtcgggcgtggtggtacatgtttgcagtcccagctactcggaaggctgaaatgagaggatcgcctgagcccagagaggtcgaggccacagtgagctgtgattttaccagcctggatgtcagagtgagaccctgtctccgaaaaaaaaaaaaaaaaaaaagacagggaattgcagtggagtttaatatacatagagccggctaaatgaaagagaagagttttatttttattcaattctgtctccctaaaaaatgggaggctaggttttgtttttttggtttttttttgagacggaatctctctgtcgcccatgctggagtgcagtggcgcaatctcggctcagtgcaacctccgcctcccgggttcaagcgattctcctgcctcaacctcctgagtagctgggattacaggcatgcgccaccatgcccggctaatttttgtatttttagtagagacggggtttaccatgttggtcaggctggtctcaaactcctgacctcatgatccacccgcctcggcctcccaaagtgctgggattacaggcctgagcccccgcacccggccgaggctagggttttaaagataatttggtgagcagaaggctggaaaatggggaatgctgattggtcgcgaaaaggatatcacaggaagtctcagctgtcttcttgcactgagtcagttcttggctaggggccactggagcaggtgagccagtttattggtctgtgtgatgccagcaaatttatcagaatgaagggtctcaaaaatacctcaaacaccaatcttaggtcttacaacaataatattatccacaggagcaagtgagaaggttgggaatcttgtgtactctggccgcatatttcctgaaccataatttctaatcttgtggctaatttcttagttttacaaaggcaatctggttcccaagcaaggagacaatttctttacggaagcggcagttatgacttttgctttaaagctaaactaaactccttccaatattagtaagacctatacccgggaatgaacaagggtagcttggaggctaaagaaaagatggagttcgcttagatctgatctctttcactgtcataattttctcactgttataattcttgcaaaagggttttcagatgtagagtcatacttttagctcctggcaacatttatgttggaactcttatacagcaactaaatcactggaacaggataattggttgaggatttactaactgctccatcaggtggaagtggcactccttactaatttacctgaaagcactatttcctgagccatggagactgagtatagcaatgatatgtgatctaaagaagttcccactctgcttcttctctgcagtgaagtcctgccaggcacgttactacttccactgccactttttcctcctccaaatgtggctaagcaattacttcccttatggaagactgtacaaagatgaaaacatggctaggttgatggggtcactctgagacaaggtagacttatgttatactttttgcaaaggtgacttcagatatggaatcataattttagctgctggcagcaatgatgttggaattcatatacagacactaaatgactggaaaaggacaattggttgaaggtttactaattgttccctcaagaggaagtgccattccctattgatttaattgacagcactatttcctcagccatggaaactgagtacagcaataatatgtgatctaaagaacattccactctgagggccagatgcagtggctcatgcctataatcccaacattttaggaggccaaggcaggcagatcacgtgaggtcaggagttaaagaccagccttgccaacacagtgaaaccccatctctactaaaatcacacaaattagctgggtgtgggctgggtttggtggctcacacctgtaatcccagcactttgggaggtcgaggtgggcagatcatctgaggtcaggaaatcaagaccagcctgaccaacatggagaaactccatctctattaaaaatacaaaattagctgggcatgctggcacatgcctgtaatcccaggtactcgggaggctgaggcatgagaattgcttgaacctgggaggtggaggctgcagtgagctgagatcgcgccactgcactccagcctgggtgacagcgtgagactctatcttcaaaaaaaaaaggctgggcgcggtggctcatgcctgtaatccccacactttgagaggccgaggcgggtggattacctgaggtcaggagttcaagaccagcctggccaacatggtgaaaccccgtctctacttaaaatacaaaaaattagccgggcgtggtggtatgtacctgcaatccctgctactcgggaggctgaggcaggagaattgcttgaacctgggaggcagaggttgcagtgagccgagatcgcaccactgcactccaatctgggggacaagagcgagacttcgtctcaaaaacaaaacaaaaaaaaaaaactttctactctgcttcttccctctggtaatgttctgccaggtacattagtacttccagacactttttcctcctccaaaggtagctaagcaattgttatttccctcatggaaaactaagtataaatgggaatatagctagaccaatgaggtcatgcagaggcaaaggagacttatgttgtttatcaagttttcttttcagtaccttaattttcacttctatttgtttaattttttatttttttggagacagagcctcactctgtcatccaggctggaatgtactagcgtgatctcagctcactgcaacctctacctcccgggttaaagcaatcctcttacctcagcctcctgagtagccgggaccacaggcccgtgccaccatgcctggctaattttagtgttagtttgtagacacaaattctcactatgttgcccaggctggtcttaaactcctgggctccagcaatctgcccactttgacctctcacacagtgctgggattgattacaggcctgagcaaccatgcccggccttcatttctactttttgattattttaaaatttatttatttttctttatttttagagacaagatcttcctacctagtccagactggggaacagtgcagcattaaactaatcctcctgactcagcttcctgacaagcagtgaccatagacacatgccaccacacctggatattttacaaaattaacagtacctaaatatggccgggcagggtggctcactcctgtaatcccagcactttgggaggccgaggcaggtggatcacctgaggtcaggagttcgagaccaacctggacaacatggtgaaacctcgtctctactaaatatacaaaaattatctgggcgtggtggcgggcacctgtaatcctagctactcaggaggctgaggcaggagaatcacttgaacccggaaggcggaggttgcagtgagccaagatcatgccacttcactccagcctgggcaacagagcaaaactatgtcttaaaaaaaaaaaaaaaaaaaaaaaaaaactggccaggcgcggtggctcacgcctgtaatcccagcactttgggaggccaaggctggcaggtcaggaggtcaggagttcgcgaccagcctggccaacatagtgaaaccccgtctctactaaaagtacaaaaaaattagccaggcgtggtggtggggggcctgtaatctcagctacttgggaggttgaggcaggagaattgctttaacccacgagacggaggttgcagtgagatgagattgtgccattgcactccagcctgggtgacagaacgagactctgtctcaaaaaaaaaaaaaaaaaaaaaaactggccaggcgcggtggctcacgcctgtaatcccagcactttgggaggccgaggcgggcagatcacgatgtcgggagatggagaccatcctgactaacacggtgaaaccccgtctctactaaaaatacaaaaaattagtcaggcgtggtggcgggcgcctgtagtcccagctactcgggaggctgaggcaggagaatggcgtgaacccgggaggcggagcttgcagtgagcggagatggcgccactgcactccagcctgggggacagagcaagactccgtctcaaaaaaaaaaaaaaaaaaaaacaggccgggagtggtggctcacgcctgtaatcccagcactttgggaggccaaggcaggcggatcgcaaggtcaacagatcaagaccaccctggccaacatgggaaaaccccgtctctactaaaaatacaaaaattagctaggtgtggtggcgcatgcctgtagtcccaactacttaggaaactgaggcaagagaatcccttgaaccagggagacggaggctgcagtgagccaagatcacgccactgcattccaggctggcgacagagcaagagtccatctcaaaaaaataaataaataaaagtataaaatttagctaaacatgggggcacacgcctgtagtcccagctactcagaaggctgaggcaggagaactgcttgaacccaggaggtggacgttgcagtgagccgagatcacgccactgcactccaacctgggtgacaagagcgagactctgtctcaaaaaaaaaaaaaagaaagaaattccacataccaaactagtcccaggaataaatatgcaatttattaaacaagaaaataacagcctaacacaatagccaaaaaagttaaaatttcagaaatatttgttttcccatgaaaactagatagccagtcatggtggctcatgcctgtaatttcagcacgttgggaggccaaggcagaaggactgtttgaacccaggagttctagagtaccgtggacaacatagggagaccaggtctctacaaaaaattaagaaattagatgggtgtggccgggcgcggtggctcatgcctgtaatcccagcactttgggaggccaaggtgggcagatcgcaaggtgaggagtttgagaccagcctggccaatatggtgaaaccccatctctactaaaaatacaaaattaaccgggcgttgtggcacatgcctgtaatcccagctgagattgtgccactgcactccagcctgggcgacagagcgaggctccgtctcaaaaaaaaaaaaatatatagaaaagaaaagaaattagatgggtgtgggccaggcgcggtggctcacgcctgtaatcccagccttctgggaggccgaggcgggcggatcacaaggtcaggagatcgagaccatcctggctaacacggtgaaaccccttctctactaaaaaatacaaaaaattagccgggtatggtggcgggcgcctgtagtcccagctactcgggaggctgaggcaggagaatggtgtgaacccaggaggtggagcctgcagtgagccgagatcgtgccactgcattccagcactccagcctgggcgacagagcaagactctgtctcaaaaaaaaaaaaaaaaaaaaattagatgggtgtggtggctcacatttgtagtcccagctgttcgggaggctgagatgggaggatcccatgggcctgggagacataggctgcagtgagcagtgatcaagccactgcactccagcctaagtgacagatggagactgtcccaaacaaaacaaactaagcagaaaaactaaggatagcaccttcgaatttgtccctaagttgtcaaagtcttggacccccactgaaggaattccctggtacttagacaccagataaagcagaagtgaagactgcactctaattatcctcctttgttttaggtttcttcctgaaggacttgtgaaaagtcacttcctctacttttttttctgctgacccccaaattttaaacaaagcttttcttccctaaggaattgcaaatcagaaaatctttaaactgtaagccccagctttaaaatatcccaccctttcaagcataaaccaatgagtaatctccatgtattcatttgttattttgcctgtagcatctacattcctaaaacttacccctgcttctaaaaatccctgcctgcaatccagtgggggaggtcaggatttaagactttggctgggcgcagtggctcacgcctataatcccggcactttcggaggctgaggcgggcggatcacaaggtcaggagatcaagaccatcctggctaacatggtgaaaccccatctctactaaaaatacaaaaaaaaaaaaaaagactttatgcctgtgtggtcctccttgattgggactctgcaataaaaggctttttccacatcacttcaaaccccagtgtaaatgcctggctttccagggcaaggcaactggatcacagttctgtcctcaacccctggggctctggttgcaaggctggaaatagacaggctttctcccacatctttctcactttcatgtaggaaagaagtagtttccttctttaaaatcaaaactgttttatcctcaggatatgtacctgcacggacatcataaagttaacttttcagaatatgtttatcagccaggtagagtggcttacagctataatcctagcacttttggaaactaaggtgggaggattgctcatgactaggtgttcacaaccagcctgagcaatggaatgagaacctgtctctatgaaaggaatgaaaaatgagctaagaatggtgatacctgtctgtagtcatagctactcagaaggctaaggcaagaggatcatttgagcccaagagttcaaggctgcagggaactgtgattgcaccactgcacttcaacctgggtgacagagggacaccctgtctcccaaaacacacacacacacacacacacacacacaaatacatatatacatctatgtatgtatgtaaatatcctatatattttccttatgcattttaaatatagttatatgttaaaatatacatgcatatttatatacaaaatataaatatgtatatttcatcttatttatttatttatttatttatttttgagatggagtttcactcttgttgcccaggctggagtgcaatggcacaatctcggcttactgcaacctctgcctcccgggttcaagcgattctcctgcctcagcctcccaagtagctgggattacaggtgcctgccaccacacctggctaattttgtatttttagtagagatggggtttctctatgtcgatcaggctggtctcgaactcccaacctcaggtgatctccctgcctccacctcccaaagtgctgggattacaggcatgagccactgtgcctggcctattttattttattatgtaatagagataacgtctcaccatattgcccaagctggtctcaacctcttcagcttaagcaatcctcctgccttggcttcccaaaatgctgagattacaggtgtctctgcagtgaatccttccgtgcatttgaagttctgagtcccatctaaggactttaccatattgcttacatccatagagtttctagccagcgtgagtccttacatgcttttgaaggattgaggcagatctaaaggctttaccacattgcttacactcatagggtttctctccagtatgaatcctttcatggtagagaaaagagttggaagaaatgaaggctttcccacactgtttacatttatagggtttctctccagtgtgagtccttttatgatagcgaatagaattagaagaaatgaaggcttttccacattgcttacactcatagggtttctctcctgtgtgagtcctttcatgcattttaagttgtgaggcaactctaaagactttaccacattgcttacatccatagggtttctctcctgtgtgagttcgtatgtgcttttgaaggactgaggcagatctgaaggctttcccacattgcttacactcatagggtttctctccagtgtgagtcctttcatgatagtgaaaggaattggaagaagtgaaggttttcccacattgtttacattcaaagggtttctctccagtgtgtgtcctttcatgtattcgaagatccttgacaaaactgaaggctttcacacattttttacattcataaggtttctctccagtgtgagtcttttcatgatagcgaaaggaagtggaagaaataaatcccttaccacatagcttacactcatagggtttctctccagtgtgttttctttcatgtactcgcaggtacttgacagatctgaaggctttcctacattgtgtacactcatagggtttctctccactgtgagtcctttcatgatattgaaaggaactgggacaattgaaggctttatcacattgcttgcatttatagcgtttctctccagtgtgacttttctcgtgtctttttaacgaactgggagaaaaaaaggctttcccacatatgttacatttatgaggtctctctccagtgtgcattctcatgtgtgtctgaaagcttacaagataagataatgctttcccacactgcttacattcatagggtttttttgcagagtggattctttcatgtctacgaacagaactgggaaaactgaatgctttcccacactgcttacattcatagggtttttttgcagagtggattctttcatgtctacgaacagaactgggaaacctgaatgctttcccacattccttacattcataaggcttttccccagtgtgagttcttccatgtattgcaaggctactggaataactaaaggctctgaggtgcctattaagggatgaaagacctatgccgatttctccacacacactgctttcatatgattgtactccaggagttttcttcttcagtgtgtcatctggaacctgtgtcaaaacttctccatgctgatgactttctttactttcagagagtctctcccctataagtcttctgtgaacaatgaaagcacattataatgggtttatcactaattttaattcctttgcaagtattacacttgcatttttaacagtgcccagcaaagtgtaggctttctgtcctgtctgaacatgaatggaacacatgctatacaagatggcctagccaggccaggcatggtggctcacgcctgtaatcccagcactttgggaggccgaggagggtggatcatgaggtcaggagatcgagaccatcctggctaacatggtgaaaccctgtctctactaaaaaatacaaaaaattagccgggcgtggtggcaggtgcctgcagtcccagctacggggaggctgaggcaggagaatagtgtgaacccgggaggcagagcttacagtgagccgagatcacaccgctgcactccagcctgggtgacagagcgagacactgtctcaaacaaacaaacaaagatggcccagccatatctcttatcaaaaaagataatattgatacagggattttaaatgctttatttatttatttatttatttatgagaccaagtctcactctgtcgtcaggctggagtgcagtggcaccatcctggctcactgcaacctccgcctcccaggttcaagcgattctcctgcctcagcctcccaaggactacaggcacgcaccaccacgcccagctaatttctcgtatttttagtagagacaggctttcaccatgttggccaggatggtctcaatctcttgacctcatgatccacccacctcagccttccaaagtgctgggattacaggtgtgagccaccatgtccagcttttacatgctattttaaagtagactattttataaatacggtctttgtctttttgtctgtttagttttgagtcagggtctcaccctgtggcccaggctgccctccagtgatgccatcatgactcagtgcaacctcaaactcccaggttcaagcgatcttccatcctgacctccaaaagggctggattatacacataagccatgtcacactttatatgtttctagggaagcttttctaagaataaatacattggaactaggtttgtttcttatgcttgcttctttttaaccttttcttccattctaagattgtatacagagacattgttttctcttttaagtgccagttaccttaggtttctcctaggattttggtgctcatcttcaatgtactggttgttccatttttttcctaaaatgcggacccagaaaaatagtcctgaattagtataaaattattttaaaaagttacttgattctatgtccatggctcattgcacctgtgtctcatttattcaaagtattccctgaccatattccaaatcactcaacagcactgatgagctagaaacacctgttctttaattcactgagggaagtaatactgtcattcttacctatggaggtcaggttcctcaaggtttcctgcatcacttccctgtagagatttttctgggaaggatccagcaaagcccactcctcctgggtgaagttcacagccacatcctcaaaggccaccgaatcctgaaatatcccacatgtggacaggaggatgagtgaggctgacagcactgggtttctataccctattcctaggaagttctcaggatgctgtggtgtgtggactccaaacatttattccatgacttggtcatcagatcccttactctgtctacactcactttcttccataaaacaattttgatgctagagttgaactctggatggggtaaagcaacagcagaataggaaaaatgtgtgtttctggtgagtccagggagaaagtcgtgctgcctggactgcccttaatgtccgaagtgtggatctgcagcacctatcttaacaaactcctttgaatttctgagcaaaacaaatttaacgtgagcagccctaagcctgcatattcttgaaaacgcctgttcacaaagttgaacctttgtgatgactagaaagtgggttttcttctgattccagtagcagaagccaaaaacaaaaaaactgggtttggcaaggggctttattaatctaactgataagagagtctggccaggcacggtggctcatgcctataaatctcagcactttgggaggtgaaggcgggcggatcgcctgaggtcaggagtttgagaccaacctggccaacatggcaaaaccccgtctctactaaaaataataaaattagccaggcatagtgatgggctcctgtaattccagctacttgggagactgaagcaggagaatcacttgaacccatgaggcagaggttgcagtgagccaaaaacgtgccaccacactccagcctgggtgacagagccagactccatcggttaaaaaaaaaaaaaaattctaattgataagagagtcataactaactaaaacaaaaactcacaaaaagaaacctttctgggaaactgtatgtagatagaaaaacctaaactgggctggacacagtggctcatgcctataattccagcactttgggaggccaaggcgggcagatcacctgatgtcagcagttcaagaccagcatgatcaatatgatgaaaccctgtctctactaatagataatcccaagtgttggtaaaccacaaaaataaagacacacacatgaaaggctagatggttgatccatacatacactctactggcattatctttcaaattggaatttatccataatatacaacccagtgacttttcccccaatatgtgagaaatttatgttccattttcatatggcaaagaaaaccaaccatgacattgtcaccaaggtcaaaaactaaactgtaaacccaaatcccattaagcagtgaaatgcataagtaaactgggcaacccatgactcaacacagtggcatgtttgcaacagaatgaggcaaaaagtcagaaacaaacccttttggtataacatgaaaggtacattaattgcaatactaagttactggaaactccaaacagccaaaattctactttgtgataaaagaaaatatggcaggcctgggctgggcgcggtggctcatgcctgtaatcccagcactttgggaggccgaggcgggtggatcacgaggtcaggagattgagaccatcctggctaacaccgtgaaaccgcatctctactaaaaatacataaaactagccggtcttggtggcgggcgcctatagtcccagctactcgggaggctgaggtaggagaatggcatgaacccgggaggcggagcttgcagtgagccaagatcgagccactgcactccagcctgggcgactgaacgagactccatctcaaaaaaagaaaaaaaaaaaagaaaaaatatggcaggcctggcacagtggctcacacctgtaatcccagcactttaggaggcaggcacagatggatcacctgagctcaggagttcgagaccagcctggccaaccaggtgaaaccacgtctctactaaaaatacgaatatcagctgggcatggtggcaggcgcttgtaatcccagctacttggggggccgaggcagcagaatcacttgaacctaggaggtagagattacaatgagccaagatcgtgcattgcactccagcttgggcaacagagcaagactctgtctcaaaaaaaaaaaaaaagaaaagaaaaagaaaagaaaagaaagaaaggctgggcgcggtgcctcagcactttgggaaactgaggtgggcagatcacaaagtcaggagtttgagaccagcctggccaatatagtgaaactccatctctactaaaaatataaaaattagctgggtgtggtggtatgcacctgtagtcccagctactcgggaagctaaggcaggagaatcgcttgaacccaggaggcagatgttgcagtgagccgagatcacgccactgcactccagcctgggcgagaggcagctccgtctcaaaaaaaaaaaaaaaaagataatacagctacaaagaataacaaaaagaaggctgggtgcggtggctcatgtctgtaattccagcactttgggaggtggatcacctgaggtcaggagttcaagaccagctcagccaaagtggtgaaaccccatctctactaaaaatacaaaaattagccaggtgtggtggcaggtgcctgtaatcccagctacttgggaggctgaggaaggagaatcgcttggacccaggagatagaagttgtagtgagcagagatggtgtcactgcactccagcctgagcgacagagcgagactccctctcaaaaaaaaaaaaaaaaaaaaagaataacaggccgggcacagtggctcacacctgtaatcccaacactttgggaagccaaggcgggtggagcatgaggtcaggagttcaagaccagcttggccaacctagtgaaaccccatctctactaaaaatacaaaaattagccaggtgtggtggcgcatgcctgtaatcccagctactcgggaggctgaggcaggagaatcacttgaacctgggaggtggaggttgcagtgagctgaactcacgccattgtactccagcttgggcaacaagagcgaaactccatctcaaaaaaaaaaagaataaccaaaagaatcaaaattttgaccacctttgtgtgccatagttagatgacatcaaagaaacacaccagaactgcccaaggactattcattttcctgggtggtgttcccaagtatattcttactgacatggcatccaattttaaaacatccaattttggccgggtgcggtggctcatgcctgtaatcccagcactgtgggaggccaaagcaggcagatcacctgagatcaggagtttgagaccagcctggccaacatggtgaaaccctgtctctactaaaaatacaaaaattagccaggtatggtggcatgcacctgtagtcccagctacttgggaggctgaagcaggagaatcgattgaacccgggaggtggagtttgcagtgagccaagattatgccagtgcactccagcctgggcgacagaaagagactccgtctcaaaagtaaataaataaataaataagaagcaattaaactgaactggctatagaacactaagacccttcacaagcatactgaagccaaattcaaatccaattcacataaatttctaatctgtggcctgaggaaacaatatcactaatgactaatttatagggaaatgaaatttaggcttaaccaggcacaataggtcaattaatctctgattacataaccaaaagtttcacctgtacagaatgtgaaaataggtgattcaaaaatttaagctgctggaactctaaattatcttgaggtttaaaggaatgccattctggggttgagacacctcacaggcagcggtaacagagccagccagggaaccttccattccctgattacagattagctttctttcttacctatattgttttgtaaaatattttaaatgacaagcaagtcaggaaagaccccttccctcttaaggattgatttcattatagactaacttccctcttacttttcttacacaaagacttcatggccatcacatcttctgaagctggaaatgttaaattcacttttttaaataagaaaagaaatgaaaaccggccgcgcgcggtggctcacgcctgtaatcccagcactttggaaggccgaggtgggtggatcacgaggtcaggagatcgagaccatcctggctaacacggtgaaaccccgtctctactaaaaaatacaaaaaaattagccgggcgcggtggcgggcgcctgtagtcccagctacttgggaggctgaggcaggacaatggcgtgaacccgggaggcggagcttgcagtgagcagagatcgcgccactgcactccagcctgggtgacagagtgagactccgtctcaaaaaaaaaaaaaaaaaaaaaaagaaaagaaaagaaattaaaaccccttgcaaagaaaattttaaagtcctgggccgggcgcggtggctcacgcctgtaatctgatacaggagaatcgcttgaaccggggaggcggaggttgcagtgagccgagattgcgccattgcactccagtctcggcaacaagagcgaaactccgtctcaaacaaacaaacaaaaaaacctgtaactaaattgtataattaatttagttgtactaattagttgtattaaattaattgtacaattaatttagttgtactaattgttgcgataattaaatttctttgttttttgcctatataagaaggagcttaactttttttttttgagacagtctcattctttcaccatggctggagtgcagtggggcattccactgtaatcccagcactttgggaggccgaggagggtggatcacgaggtcaggagttcgagaccagcctggccaatatcatgaaaccccgtctctactaaaaatacaaaaattggccgggcgcagtggctcacgcctgtaatcccagtaccttgggaggccgaagtgggcggatcacaaagtcaggaggagttcaagaccagcctggccaatatggtgaaacccgtttctactaaaaatacaaaaattagccgggcgtggtggctggcgcctgtagtcccagctactcgggaggctgaggcaagagaatcgcttgaacccgggaggcggaggttgcagtgagccgagatggcgccacagcacttcagcctggggcgacggagcgagactccgtctcaaaaatataaaaatctggtaaaataaaaacaggtcttttggggaagggggcggggactgggatggaataacgtggcagataacagccctccttcctacagcctccaaattttagacaaagctttacacactctcaaccaactgccacctacagaatccctccaccacctgtgccttctaaccccgcttccatgtgtcccgcctttcggccaaaggaacttacaccttcccggcactgattcatcattttcctgcaattcctgtctccctgaaatgaataaaaccaaactgtcaggagctgcctcgggattgcttactccagacttcgcggggttgtgtttccctcagccgaggtctctcctattcggctcagaataaacttattctacacgatttgggtttttccgttaccaaaccacaagccaggactgggagtttctcattcattaatcgctgtttgctaaaataaactctcattttttaacagtgcctcagtttaatttttaactggaaaaaaaaaggaactggggaccccacagcccacagctcctcccacacgaaccccacacccgaggcaggatcccccatgacccttccatggtcaccgcacaatctggggagacgcggggctgcgggcgcggagctgctcagagagggagccggggccggggccgcagtcgccgcgcagggaccggacaggacgcccggggtcccggctgccggcccagctccacccagcggccgaggggaccgagggccgagctgcgctagggggactgtgtctggagcccagagtcgctgcaggggggcccgggccccgccacagcgggttcctctcggttccacccagtccctcctttcgccttgggactccccagcaccgcatgctcaccatttcctggcttccaggtattctggcgtcctctctaaaggtcccgtgaacagtgcaggtcacagcgcagtcgacagagcaacagcagctacggcggaagtaactggtccctctcggagcaagaaagccccagaccttaactagcgcgagcagccctaggagtgaagagagcgggaatgcaacctccccttccctggaggacagtggcagggccccgccctagcgcccctgattggataggggtctagactccgcccccttccctgagtgacagcagaagccccgggtaactgggcgctgcagagccgaagcgactggttctggccacactttccaaggtcagctccctccctccctcccacctttacttcgaatatttgccttcggccaaacttgctccgaactgctagaagggacactgttgtcttcctcactccgtgggccgtccctgccccttcatcctacacgggacacaagtgtgcagggaattccagattcagtgtccacaaaatgtgaaagacattaaaatattttgccccaagatattgccctgccaaaatatatttctttgacagttttgaaatggctgctgcttggccagcaaacaaaaggtggccttgcaaaactgtcttttgagggggaaatttacatttgtagagaatctccgttaatgaagcactgccagctcccccgttcttttcctttccctgatctaaaagctattgagagtttgacacctttaaaatctgaagagaggtagcacatggtgactcatgtctataatcccaccacattggcaaactgaggcggaaggatcccttgaagcaaggagtttgaggccaacatcatcaacacagcgagatccctgtctttctttcttttttttttttttttttagacagtctcgatctgtcgcccaggctggagcacagtggcacgagatcttggctcactgcaacctccgcctcccaggttcaagcgattctcctgccccagcctcccaaatagctgggattacagacatgcgccaccacgccccgctaattttgtatttttagtagagacggggtttctccatgttggtcaggctggtctcgaactcacgacctcaggtgatccgcccgcctcggcctcctaaagtgctgggattacaggcgtgagccacctcgcccgccgatccctgtctttattatttaaaatttttttaaatggccgggcgctggccgggcgcagtggctcacgcctgtaatcccagcactttgggagaccgaggtgggcggatcacgaggtcaggagatcgagaccatcctggctaatacggtgaaaccccgtctctactaaaaatacaaaaaaaaaattagccgggcgtggtggtgggcgcctgtagtcccagctactcgggaggctgaggcaggagaatggcgagaacacgggaggtggagcttgtagtgagcagagatcgcaccactgtactccagcctgggccacagagcaagactgtgtctcaaaaaaacaaaacaaaacaaaacaaaaaaccagtggccgggcgcagtgagaccaggtctctaccaaaaagataagtaaatagattagggccaggcatggtggctcatgcctgtaatcccagcactttgggaggccgaggtgggtggatcacttgaggtcaggagtttgagaccagcctggccaacttgacgaaatcccatctctaccaaaaatataaaaatgagctgggtttggtggcacacacctgtgatcccagctattcggggggctgaagcaggacaattgcttgaacccagaagacggaggttgtagtgagcagagattgcaccattacactcgagcctaggtgacagagtgagaccttgtctcataaaaaggaaaaaagtctattctctgggggagacatcatctacgtaacagtccacctctagccaagcctcttcctttctcagtctactaagctgtcttgctactaaacctaatttactgacctcaggtcgctatataatcttctctgtcttatagctgggtgtgtcttcattctgaaggttcccatgtatacatgttaaatacatttgcatgccttcttttctattaatcaatctgcctcagatcaattagttttcagcaaacctttaggacacgaagagtctatcacccccacaaagccatccccttgtctcagggcaggaggggaacaaggccatgtatgactgctccaggagggagagacagatctcctgcagtggggcaagaatcgggatgaggcatggccaaggtttcctcacatacacccatcttctcctcacagtgtggaaactccccctcctctccacaccttcattttcattagcgggaaactctcacctggagtcagtttaatcttattaccagaaaggggtaccaatccagaccccaaaagagagttcttggacctcatgtaagaacaaattcagggtgagtccataaagtaaaagcaagtttattacagaagtaaagaaacaaaagaatggctactccatagacagagcagcagcatggtctgcctgacaatgtatacttatagttatttcttgattatgtgctaaacaaggggtggattattcatgagtgttctgggaaaggggcaggcaattcccagaactgagggttcctacctcttgttataccacatagggtaacgtctggatattgccatggtatttgtaaactgccatggcgcttgtgggagtgtttgttagcatgttaatgctttataattagtgtataataagtagtgaggaccacataaggtcactttcttttcttttctttttttttttgagacagagtctcactccctcgcccaggctggagtgcagcagcgcaatcatagctcgctgcagcctctctgccttcctgcagcccctgcctcccaggctcaagcaatcctcccagctcagcctcctgagtagctgagactacagccacaggccaccacaatcagctaatttttgtattttttgtagagatggggtatcactgtgttgcccagggtggcagaggtcactttcgtcgccaacttggttttggtgggctttggctggtttcttcagcgcattctgttttatcagtggggtctttatgacctgtatcttgtgataccagtcctgccgacctcctagctcatcctgtgactaagaacgcctaatcacctgggaatgcagcccagtaggtctcacccttattttacccagcccctattcaagatggtttcactctgcttcaaacacccctgacattatgacttaaataaagtcaactttataaaccctttgttcataacacaacccaaacaatttgttctctgaggctgaccttcacagatttgcttcatatatatcaattacagtctgtccccagcgaccctgtgcatgccaaaaccaaaacactgcccagaaaatagctccaggcctgaaggtacctctgaaaggtacaaccccagataggacagaacccccgagcgcatctgcacgtgggtcttctgccatccagggctctgcagcttcccagaatccacactccttctggagctggaggccaccttcaagggagggcgggctccgggggaagcccccaggagtttgcaaaaggagccccctttccctccttttgcaaactccagactagcctcagcggggagtcattggcctccggctctgctgccccctacaggttattaagccgcttcttaccccattgatcagttcctagaaacaaacaccctcaatcccagtgtgtgaataagacgccagcagagtctctgctttcctcctgtggtgcttttttttattttgttttgtttgtttgtttgtgacggagtctcgctctgtcgcccaggctggagtgcagtggcgcgatctcggctcactgcaagctcctcctcccgggttcaggccattctcctgcctcagtctcctgagtagctgggactacacaggcgcccgccaccacgcgcggctaattttttttttttttttttttggagactgagtttcactcttgttgcccaggccggagtgcagtggcgcgatctcggctcactacaagctccgcctcccgggttctcgccattctcctgccgcagcctcccgagtaactgggactacaggtgccggccaccgcgcccggctaattttttgtatttttagtagagacggggtttcactgtgttagccaggatgctctcgatctcctgacctcgtgatccgcccgcgtcggcctcccaaagtgttggaattacaggcgtgagccaccgcgcccggcctcctcctgtgcgttatgtatgacataaggaaaaacaggctgggtgcggtggctcatgcctgtaatcccagcactttgggaggccaaggcgggcagatcatgaggtcaggagttcgagaccagcagcctggccaacatagtgaaacctcgtctcttctaaaaatacaaaaaattagccaggcgtggtggcaggcgcctgtagtcccagctacttggggggctgaggaaggagaatcgcttgaacccgggagggagaggttgtggtgagccgagatcgcgccactgcactccagcctgggcaacaagagtgaaactcagtctcaaaaaaaaaaaaaaaaaaaaattagccaggcgaatagcttgaacctgagaggtggaggttgcagtgagccgagatggcaccactgcactccatcctgggcgacagaacgagactccatcagaaagaaaagaaaggaaggaaaaaaagaagggaagggaaagggacaggaggggacgataggggaggggaggcggtcgggagggatgtgcagcccaggaggagaaggaagggggccagggaggcttagtcagtgggcggtgggtgtgtgggtgtgtgtcctgtcagcttcacattgtccaaaggatcagaattcagttgtgagtttatgaaagtgaaaagcagggaatggcctttctggaaaacacatacttcaaagaaatgggctcagttctttcttactcagattttgaacaactcattttcacaaccccaaaccctctgcaggtcacatttcctcctctcattttggtcttggcctgaaccctacctgctctccttgcacccttgttcccagcaaaccgaggattgggctgcttattctctgtgcccaataatgagatgcagatgaactgggaaagaagagttgcttgctttatttattttttttatttttttgaaatggaggcttgctctgtctcccaggctggagtgcagtggcgcgatcttggctcactgaacctccacctctctggttcaagcgattcttgtgcctcactcagcctctcgagtaactgagattacaggcatgcaccaccacgcctggctaatttttgtatttttagtagagacggggtttcaccatgctggcctccaactcctggcctcaagtgatgtgcccgcctgggcagcccaaagtgctgggattacaggcgtgagccaccgtgcctggcctaggtttttaacggtattcctaaggaaacacaaatcatggcatgagtgtgtcctctctagaaaaagaattaaatacaatggttgaagtaagagtagaaactccaccttggagtcttctcccttaatgtgacacaaacatcataggtgagtcttccagacacgattccgccacaactttttttttttgaggcagagttttgcttttgttgtccatgctggagtgcaatggcacgatttccactcaccgcaacctctgcctcctgggttcaagcgattctcctgcctcagcctcccaagtatctgggattacaggcatgcaccaccatgcccagctaatttttgtatttttagtagagacagggtttctcgatgttggtcaggctggtcttgaactcccgacctcaggtgatctgcctgccttggcctcccaaagtgctaagattacaggcgtgagccactgcacccggcctcccccacaacttattacaggctgccaaagagtcaggcaaaacagtgctggcatcctctttttctctgaaaaatgtgtgctatccctccccttggcctctcgcccaccctactccccgtctttgctttcttcctgtcccctcattgtgtccagccagtgccattgtgtccagaccgtgggttcctcagtggccattgcctccaccaccatgatatggaaattttttcttaattaatagagatgtgggctcactattttgcccaggcatttcttgaactcctgggttcaagtgatcctctggcctcagcctcccaaaccgatagaattatgggcgcaagccaccatgcccagcctagaagtcttttaatgcatttacattttcttagaattttccttctttactttacatacacacacaggaggaaagcagggactctgttggtttcttgggttttttgtttgtttgtttgtttgtttgtttgtttgtttgagacagagtcttgctcagtcgcccaggctggagtgcagtggcgcaatctcggctcactgcaagttccagcttccgggttcacgccattctcccgcctcagcctcccgagtagctgggactacaggcacacaccaccacacctggattttttttgtatttttagtagagacagggtttcaccgtgttagccaggtcgatcttctgaccttgtgatccgcccgcctcggcctcccaaagagctgggattgagcactttgccaggtgtgagccactgcgcccggccggtttcttgtttttaaaagatgaggttgaagatctttttgtctgatcatggaggtgaaatgcaggtgaataacctgcagggggcagcagagtctgaggccggtgactccacgctgaggccagcctggagcctacaaagggaagaaaacggagctcccctgagggcttcccaggcagccctccctccccagcaggtggcatccagctgcgcagagcagctgcagaacggctgtggattctgagaaggtgcagaggcctgaaaagctggaaaccttagtgcagatcccctgggggttctgtcctttctgggtttgcctgtctggagcctggggccattttccggacaatgctttggttttgatatgtgtagggtcactagggtcaatagtgtaatttgtatatatgaagaaaatgcgtccaggcaccctggctcttgtctctaatcccaacactttgggagggcgaggtgggtgattaggttgagcaccggagttcaagaccagcctgggcaatatggtgagaccccatcactacaaaaaatacaaaaattagctggttgtggtggtgaatgcatgtatccccagctactcaggaggctgaggtgggaggaacgattgagccctggaggctgcagtgagctgtgatcgcaccaccacacttaagcctaggtgacagtgagactctgtctccaaaaaaaatgtgtggtaagtcaggctcagagacagaattgtttgggatgttgagaaagagttaatgaagttgacagtttattcaggtcacaaacttaaactcaccgcaggtgagagtttcctgacagtgaaaataaagttctggaaggagagagcattttcacactgtgacgaggaatgtggatgtgagaaggccttggccttgcctcattccaaattatcttgacctgcagaacatctgtctctccctcctgatgtagtcttgcctggcctcatctgggctcctctcctactctgaggcaaggggatagctttgatggagcgataggctcttgacccccaaaacatttgctaaaatatcgttgacataaagctgattaatatgagaaaggcatatgaatttatttaccatgtatacagggctgcctttagtaagaagacccacccaacaataagatagaaaagcttatataccatcttgaggctgttactaagggaggagaccacccgtcatattgtcgtatgcccaatttctgcctccaaagaaagaagaagtaaaaactaaaaggcagaaatgaaatccacaagcagacagcccggcgcctcaccctgggcctggtagttaaagatggacccctgacctaatcagttatgttatctatagagtacgcacattgtatagaaaagcactgtgaaaatccctgtcctgttctgttccggtctaattaccggtgtatgtagcccccagtcacgtaccccctgcttgctgaatcgatcacgaccctctcaagtagacccccttagagttgtgagcccttaaaagagacaggaattgctcactcagggagctcggctcttgagacaggagtcttgccgatgctccctgcccagtaaaacgcgtccttctttaactccgtgtctgaggggttttgtctgcggtttgtcctgctacattaccagaaaggggtcctaattcagactccgggagagagttcttggttctcatgaaagaactcagggtgagtccttagagtaaagtgaaagcaagtttattagagaagtaaaatctcaggccaggagcggtggctcatgcctgtaatcctagcactttgggaggctgaggctgccagatcacctgaggtcaggagttcaaaactagcctgggcaacacggtgaaaccctgtctgtactaaaaatacaaaaaaaattagccaggcatggctgcatgtgcctgtagtcccagctactcgggaggctggggcagtgaggtggaggttgcagtgagctgagattgcaccaccacaatccagcctgggcaatagagggatactccatctccaataaaaaaaaatgaattgggtttaacattaataaaatatcagtaataattataatttttatgtgaaattactgtgtgtcacagaaatgaccagaccttaataatggatgttcttcgccgggtgcagtggctcaaagtgctgtaatcccagcactttgggaggaagaagtgggtggatcacgacgtcagggattcaagaccagcctggccaacatggtgaaaccctgtctgtactaaaaatacaaaaaattagctgggtgtagtggtacatacctgtaatcccagctactcaggaggctgtggcaggagaattgcttgaacccaggaggcagaggagatctagaccatcctggctaacacggtgaaaccccctctctactaaaaatacaaaaaaaaaattagccgggcgtggtggcaggcgcctgtagtcccagctactcgggaggctgaggcaggagaatggcgtgaacccaggaggcggagcttgcagtgagctaaaatcgcaccactggactccagcctgggtgacagagcgagactccgtctcaaaaaaataaaaataaaaataaaaacccgggtggacaagaaacaaaaaataaaaagaattttaaaactgtaaaactgttgttgagtactaatgtgctcataactattgagcagaacagaagtttatgacatagactgaactaagggaagactaaaataatctttttatagctttttgtttaaaatattgctaattcttttgtttttcaaagtccagaaaaacttttttttttttttttttgagatggaatctcactttgtcacccaggctggagtgcagtcactcaatctcagcatctcgctcactgcaacctccacctcccaggttcaagtaattctcctgcctcagcctccagagtagctgggattacaggcacccgccaccaggcctggctaatttctgtattttttagtagagactgggtttcgccatgttggccagctggtcttgagctcctgaccttaggtgatctgcccgccttggcctcccaaagtgctgggattacaggcgtgagccaccgtgcctggccataggtatcactttctttacggcccagaacaaatagccctcctaaacaaataatgtacataactcacaaatttcttgcttaccatcaaaaaccttgatttatcaaacatttcaggtgacaaaacaatgcaagttcccaagttgcattctataaaatctctagcaaacctttgtttctttgcagccggctcccttctgctggttctgcctgttgccttcttgcaaggtactttcatattttccttaataaatctgcctttttttttttttttttttttttttttacctacaactgtcttggtaaatccctttttttttttttttttttttttgagatggagtcttgctctgttgcccaggctggagtgcagtggcacaatctcgactcactgcagcctttgcctcccgattctccagcgattctcctgcctcagcctcctgggtagttgggattacaggcgcccaccaccaagcccggctaatttttgtatttttagtagagatggggtttcgccacattggccaggctggtttcaaactcctgacctcaggtgatccgcccgcctcggtctcccaaagtgctgggattacaggtgtgagccacatcgcccggccagtcttgataaattcttttacccttgcgccactggcccagatagtagccactcacccacaacatagatgaagactcccacagagagaatggatgcaaaatgcttcttttaagaatttctggccgggcacggttgctcacgcctgtaatcccagcactttgggaggccgagacgggcggatcacgaggtcaggagatcgagaccatcgtggctaacacggtgaaaccccgtctctactaaaagcacaaaaaattagccaggcatggtggcaggcgcctgtggtcccagctactcgggaggctgagacaggagaatggcgtgaacccgggaggcggagcttgcggtgagccgagatcgcgtcactcactccagcctgggcaacagagcaagacaccatctcaaaaaaaaaaaaaaaaaaaagcaaaaccagaatttcttacttattttgttttttggtctcactctgttgcccaggctggagtgtactggtgcaatcacagctcactgcagccctcgactcctgggccaaagtgattctcctgccctggcctcctaaagtgctggtattacaggccccagccaccttgcctggcctctttccagactttttttgtttttgttttttttgagacggagtttcattcttgttgcccaggctggagtccagtggcatgatctcggctcactgcaacctccgcctcccagcttcaagtgattctcctgcctcagcctcccacatagctaggattacaggcgtccgccaccacgactggctaatattttgtattttagtagagatgtggtttcaccatgttggccaggctggtctcgaactcccgaccacaggtgatatacccgcctcggcctcccaaagtgctgaaattacaggcgtgagccgccgcgcccggctttccagacttttaaaagtgtcagactctcaatttctcccggatcagggaaagggaaaaggggagagggggcatggcttcactaatggaaatactccatagacgcaaatttcaccccccagaagacagttgtgcaagggcaaagctgcagccattcgaaattgccaaataaatatattttggaataaaatattttaattgctttcacctctattaaacatagagtctggaactccctgcacacacttatgacactgtgcaggacgaagaagcagggacagaccattgacagagccacttctagtaattaagacgagcaagtttggccgaaatgcaaattttcaaagagcagggcgtagagagggaacttgaccttggactgtggcttgaagcggtcagtcctgctctgcttggccctgttacccaggacttctgctgtcactcaggatgcagggggcggggcctggcgctccacccaatcagagtcgccggggtggggcccggccaactgtttatccgcgggtcacattgccgttcgcctcagtctttggcccctcccgccgggtgaggttggcaccccgtttttcctgctctgagagggaccggttgccaccgccatacttctgtcgccctgtcgtctgtgttgtgactgctttggacgtgggagtcacctgaaagccaggaaatggtgagtgtgagcccccgctgggagtcccgagacttgggggagggtaggcggaggctggttggaactggctggaaccggctgtgccgggacccggacctccccgcggcgactcgaggtctggggcccgagccccgctggcgcagctcggccttcggtccattcggccgccgggtgcggctgggccggcagccgggacccctgggcgccctgtctcgtcgccgcgcggcgactgcggccccagcccgggagccctctctggacagctccgcgcccgcagcccggagcctctccatattgtgcggggccacgggagggtcatgggggcaatcccgccttgggtgtggggctcgtgcgggaggagctgcgctgtgaggccctcagtgccccctttctcctgttaaaacttaaacaggcccggtgctgggaatagaggcgtgagccaccgcgcctggcctagcgtggagaacttgtgacagcggataaatgttttccctgctgtctgtggcttagagcttggcaactgctgtcgtgtttttgttcacatcatgatcaatgtgtactagatgctttgttgttgtaatcgcctgaggggttcttcctgcctgtgctgcaaaaagaaagaccagggcattgcagtaaagaaaatgtttgacacgagatggaccacgcaacgccgaagacggagacagagttagcactcaaatcagtctccccgaaggcttatagttagggatttttctttaatatttttttcttacaatttttttttttttttttaagacagagtctcgctcttttttgcccaggctggagtgcaatgacacgatctgggctcagtgcaacctctgcctcccggattcaagcgattcttctgctcagcttccctagtagctggggttacaggcacgccaccacgccctgctgatttctgtattttcagtaaagacggggtttcaccgtgttggccaaggtggtcttgaactcctgacctcaggtgatccgcccgcatcggcctcctaaagggctaggattacaggcgtgagccacctggcccggctaaaaattgttttttaaacaaggtctcactctgtcgcccaggttggagtgcatggcgcgatcacggctcactgcatcctggacccacctgagcagcagctcaggtgattgtgctgcctcaccctcccgagtagctgggactacaggcgcaggcggctaatttttgtatttttggtagagatggggtttcgccatgttgcccaggctggtcttgaactcctgggctcaagcgatctgctcacctcggccccccaaagtgctgggtttacaggtgtgagccaccgaactcggccaggggtttttcaaaggcagaatcggggaagaggtggtgggaaatggtcctcctgagtgctgagttgcttatagaggagcagggttggtgggcctgagtggagccatgggtgtcagacaagcaaaaaacctgaaaacacttatctgcagaagtatcttgggaccagtctataccatagcaaaattcaggctcctcatcgctccccactctgttccccccgccccgactcatggtttttcattagctttaggaaggcagtgtttaaggaagagctattatcatttaaactataacataaatgtcttcttttttttttttttttttttttttgttgttgttgttgacggaggctccctctgtcgcccagactggagtgcagtgacgcgatctcggctcactgcaagctctgcctcccgggttcacgccattctcctgcctcagcctccggagtagctgggactacaggcgcctgccaccaagcccggctaattttttgtgtttttagtagagacggggtttcaacgtgttagccaggatggtctggatttcctgacctcatgatccgcccacctcggcctcccaaagtgctgggattacaggcgtgagccacctcgcccggccaaatgtcttctaaagttagctcagcctaagcctaggagtaattaaggcagcttgaaaggtaaagacaagagaagcagttggctagatctctttgactgccataattttttcagtgttacagtttttgcaaaagtggtttcattatcatggaaatagtaataaaataatattgtcaacttaaaaataatgagatttccataaaaaattagctgggtgtggtggtacgctcctgtagtcccagctactccggaggctgaggcaggagaatcacttgaacccgggaggtggagtttgcagtgagctgagatcgcgccactgcactccagcttgggctacagagtgagactccctctcaagtaaaataataataataatgagatttccctggaggccagtcagtcaaggctgcaccgaaccgtgatcacaccactgcactccagtctgggtgacagagtgagaccctgtctcaaaaataagaaaattaggccgggtgcagtggcttacgcctgtaatcccagcgctttgggaggccgggtcgggcaatcacctgagaagttcgagaccaggctggctaacatggtgaaaccccgtctctactaaaaatataaaaattagccaggtgtgatggtggtgcatctataatcccagctactggggaggctgaggcaggggaattgcttgcacctgggaggcggaggttgcagtgagctgagaccacgccattgcactatagcttgggcaacaagagtgaaactctgtctcaaaaaaaaaaaaaaaaaaaaaaaaaaaggccgggcgcggtggctcacgcctgtaatcccagcactttgggaggccgaggtgggtggatcacgaggtcaggagattgagaccagcctggcacacacagtggaactccgtctctactaaaaatacaaaaaattagccgggcgtggtagtgggcacctgtagtcccagctatcagagaggctgaggcaggagacgtgaacccaggaggtggagcttgcagtgagccgagatcgcgccactgcactccagcctgggccacagagcgagactctgtctcaaaaaaaagaaagaaagaaagaaagaaagaaagaaggaaagaaggaaagaaggaaggaaggaaggaaggaaggaaagaaaattaaaaattaatttaaaaatagccaggcatagtgcctcacacctacatcctagcactttaggaggccaaggtgggtgggcgaggggttgtgggatcctttgagctcaggagtttgagaccagtctgggtaacatggtagaacctcatcttaacaaactgcttaaaaaatagccaggcatgatggtatgtgtctgtagtacccagccacttgggaggctgaagtgggaggatggcttgagctgagaggtggaggctgcagtgaggcatgatcatgccactggacttcagcctgggcgacagagcaagaaactgtctcaaaaaataaaaatagagattcaaaaaatatggttaaaggctgggtgcggtggctcacgcctgtaaacccagcaccttgggaggctgaggcgggcagatcatgaggtcaggagttcgagaccagcctgaccaacatggtgaaaccccgtctctattaaaaaaatatatacaaaaattagccgggcatggtggtgggcgcttgtaatcccagctactcaggaggctgaggcaggagaattgcttgaaaccagaaggcggaggttgtagtgagccaagatcgtgccactgcactccagcctgggcaacaagagtgaaactccgtctcaaaaaaaataaaaaataaaataatttaaagttctaatggcttcaggttggaattattgacttccacaaatgtgtgtattgtctgaaatgattagatacttttgctttccattttgtggtacgaaatgcaaatgccttataatttcctttccatgtgtaaacctgaacctgagtttgagggattttgctagattcttcaaacactgggtattttctcattgaatcagacctgagcccagtgactgcaagctaaggtcaatcagaagcctgcaaagaggtcattgaaggctcacttgtttcttgctggggagcctctcctgcagtgtcccagctgctcacactgacccagctgctcacactgaccatgggaggagccctttattctgagagaatctcagagccctggaaaactgaggatccacaggcagatgcagcgggtcagcgatgcctttctgaggctagttgtcctaaggttgtttctaaacatttttaatgaaacagatgtggatttaggtaaggaatgacttttctttttattcttttattcctttttttttttttttttttttgagaccaagtcttgctctgtcacccaggctggaatgcagtggtgtgatctcggctcactgcaacctctgcctcctgggttcaagcaattctcctgtctcagcctcctgagtagctgggattacaggcgcccagcaccatgcccggctaattttttgtattgttagtagagatagggtttcaccatgttggtcaggctggtctcaaactcctgacctcaggtgatccacccaccttggcctcccaaagtgctggaattaacaggggtgagccatcgcgcccagccaggaatgactttattctaaaggagaattgaaataaggaaaagggagaaagtataagatctgtaagcatctcaaagttagcccaaaaaggaattttttttttttttacagagaggagaaaacaaggttaggaagaaggtgagagtgggaggtcaggatacaatttcattcgttaataatttgtattttaggccaggtgcggtggctcacacctataatcctagcactttgggaggccgaggtgggtggatcacctgaggtcaggaatttgatactagcctgaccaacatggtgaaaccccgtctctactaaaaatacaaaaattagccaggcgtggtggcacgtgcctgtagtcccagctactcaggaggctgaggtaggagaatcgcttgaacccaggaggcggaggttgcggagagccaagtttgcgccaactgcactgtagcctggacaacagtgagactccgtctcaaaaaaaaaaaaaaaaaaagaggccgggcgcggtggctcatgcctgtaatcccagctcgcagggaggcaagaggcgggaggatagcttgagcccaggagttcgagacctgcctgggcaatataatgagaccccgttctccacaaaaaggaaaaaaaaaaaaagacaaaaataaaaataagcgtaaaaaaaaaaaaaaaagaaactgaagcatgtgtggtcatgccacgctgaacacatctattctctgtagctaagcagggttgggcctggttagtaaatgtatagaaaatgcctaggaatactggctgttttatgcttaaaaacaaaaaaagaaaggatttcacaagataattcaccaaatggaagaaaaacttctatattgaatatctggtccatcttcttcttcacataggatgggggatgaattggtagccagcactctgaggcatcctggcccattactgcaggaggtgaactctaccctgtagtcctctctggcagtggtgcaaccacagtctccaatctcatcctgtttatagggtgacaacaagaagtggtcatcaggagagaaatctgacctggtgttttggatgtttgagtaggaggtactcccaagaaatccatcttcctccccaccagaagagaacttcttatcactaatgcattgcagacatatgaattagggtctcaagtctaagtctttattccttgtaaagagagattacactgaaaacttggtaaaaatttcaaggaaggttttattcagcacaattgcaatatgtgttgaataaagccttattttttgcctatatgttataggacaatttaatatgggaaagaaattgaactcaacctgaatgcatcaacaagacaattatatctaaagagcaaggtaccgtagaggatggaacttggtgaggtgtcaagagttggggaagagaatattaataaattatcatagatgagggaaacaacttgattagatatcaagttggggggcattctctctaaactctcttattaggatttagctataactgggctctgcaggacaaacacaaaagctagtcaggaagtgggctccgaggagcctcactgaagtatgatcaaggaaggagtccttgagatcctcccagcctagttcttgctagggctgatgataaatccttaagtttctggtttcctccccacgttccagaacactccctcatttcccctttccactggacatcattatcaatcatgtgtcccccatgatacatgtgaaactgctgcagtattttaattgcttaccatttttttccacaaagcaataagtggtgggtatattcaacccattttccatgtgccccgagaatactcttgtctctaatcctaatgtaacatcatatacgtttttgttatattaggattagaaacaagttctgtttagaaattttattttcacattgaaagtcaatcagatttgcttcagctttaaagagtatgcttgtgtaaaattcaatgaatgctggcagcaagctgcacttttttttctaaatgggaaatgggttaaaaatgtattactttatgaatactgttcatgagaggaaagcactcaataaccactaaaaactacattatataaatccttgtgcctgatgactcctggtccactgacgttttcatgagcttcttggcccttttcatatatcttgcaggaatgtcattcagatactttccctatctttcaatcaattaggttttttttttttttttacttggtacaataatttattattgtaaaaaaattaacatttattagctttaggaattttacatgtactgttgagttagtttgtcaaatctatataactcgtctaagatgaataatactgtatttttgtgactggccttttgcaatcagtatagaatcctgaattttttttcttttttttttttttgtttgtttgagatggagtctcactctctcacacagcctggagtgcagtggcatgatcttggctcactgcaacctctgcctcctgggttcaagctgttctctgcctcagcctcccaagtagctgggattccaggcatccaccaccatgcccagctaatttttgtatttttagtagagatggggtttcaccatctaggccaggctggtcttgaactcctgacctcgtgatccactctgcctcggcctcccaaagtgctgggattacgggcatgagccactgcatccagctgaatcctgaattttcatgctttttgtagcatgggacagaaagttattttgtaagactaaatactatcccattgtaagtacatgcataccacgttttctttatccatttagccatcagtggacatttggattgatccatctcttggctattgtgaacagtggttttcaaatatttcttcaaagatccaactttcaatttatatgaattgaatataaatagacccagaaatgggttgctggaagaaaattttttttttttttgctagtttttcaggcaccaccatactgttttccataaagattgagccattttgcaatcctttggtcagagcacatgggttccaatttctcaacgttttttccaaactttatatttgaggtggtttgatttttcttttttctttttctttttttttgagataaagtctcagtgttgttgcccaggctgaagtgcaatggcgcgatctacgctcactgcaacctccgcctcccagcttcaagcaattctctggccccagcctcctgagtagctaggattacaggcacccaccaccatgcctggctaattttttgtatttttagtagagacagggtttcaccatgttgaccaggctggtcttgagctcctgacctcaggtgatccacccacctcggcctcccaaagtgctgggattacaggcatgagccaccgcgcctggccttgatttttcttttctttttagttgaatgtaagaattcattatattttctgaatattgagacttttccagatatatgactttccaatatttgctccagcatcatggggtgccttttccatctgtttatggtgtcccctcatagacagaacttttaaattttgataaatatttgcctttttgttaagagtgggtgcactggagtttttatccctgaactttgtctccattcagccttcagcatttcatcaattacaatttaagttttcctaccacagtctgctttttttttttgagacagagtttcgcttttgttgcccaggctggagtgcaatggtgcgatctcagctcaccgcaacctccgcctgccaggttaaagcaattctcctgcctcagcctcccgagtacctgggattacaggcatacaccaccacgcccagctaattttgtatttttagtagagacagggtttctccatgttgaggctggtctcgaactcctgatctcaagcgatccgcacgcctcagccttccaaagtcctgggattacaggtgtgagccaccgcgcccggcccacagtactgtttttcacaaaatttctattcatgagttttttatttagatagttctgcctctcttatcagttgggttggttgaaccccttgcaaaatccagttttttttttttgcttttgttgtctgctgcttcaatcagaataaaatcccccttccaggtaatcttcaatggttaaactttgtgaacaggcattttcaaggatatatagcctcaggactgctaatgttaacattttctgcaggtgaatttagaggactgtgttatgacaggtgctatagacccatgctacaaacagacattaagagcagcccaggcagcgcacctttctccctggattccatgaaaagacacatttttctattctgctgttcgtttattgcttagttctgttccagcatcagaattgctttagagaagaaagtaagtgtagacagagagtaatgggtcagatgaccaagaaatagaataaatgtttggagtccacagcatcatgggaacttcttaggaagagggtatagacccccagtgctgtcagtctcacccatcctcctctatacatgtgggatgtttcaggacttggtggctttcgaggatgtggctgtgaacttcacccaggaggagtggtctttgctggatccttcccagaagaatctctacagagaagtgatgcaggaaaccttgaggaatctggcctccataggtaagaatgacagtattacgtcccccagtgaatgagacaagtgtttctagctcattaatgctattccttgatttggaatatggacaggcaatactttgatgaataaatgaggtatggctctaatgtcccgtgaacatagaatctaatcattttttcataattttattttaattcaggattctttttctgattctgtattttaggagaaaaatggaaagaccagaacattgaagatcagtacaaaaatcccaggaataatctaaggtgatttaaactcacgagacaaagcaatgtctctctagaaaatctcagaatgcgagaatatgttaagaagaagcaaataaaggaaatatgcctagcattaaatttatttactcttaaaatattcactctaaaaacctacatttaaatgtgatctaggctgggcacagtggctcacacctgtaatttcaactgtttgggagttggaggtgggaggattgctagaggcctggagtttgagaagagcctgagcaaaatggcgagacttcatctcaaacaaagaactagctatacattgtggcatatacctgtagtcctagctacatcgaaggctgaggcaggaagatcacttgagtccaggagttcaagggtgctgtgaaccatgatgatgccactgcactccagcctgggctatatggtgaccctgactcaagaaaatgatatagaagtttagtatttgtaaaatagtctacatggaaatattatgaagaattctcatatggtgtttttcttttttaaacatatgatttttaaaaataatacgtatagataggccatcttatagccatatggtccagtcaccttccaacaatttagacagggtagaaagcctacactttcctggataatgttgaaagtgcaagttcagtggggagggatagcattaggagatatacctaatgctaaatgacgagttaatgggtgcagcacaccaaatgggacatgtatacatatgtaacaaacctgcacgttgtgcacatgtaccctaaaacttaaagtatattaataataaaataaaataaaataaaataaaatgcaagtgtaatccttgttaataaacatcaaatcacttataaacaaaccttcaataatgtgtttctcatttttcacagaagtcttctgggagagagagttgatgaaaatacagaagaaaatcattgtggagaaacttctagccagattccagatgacacactgaacaaaaaaacttctcctggagtaaaatcatgtgaaagcagtgtgtgtggagaagtcttcgtgggtcattcttcccttaataggcacattagagctgacactgcacacaagccgtctgagtatcaggaatatggacaggagccatataagtgtcaacaacgtaagaaagccttcagatgtcacccctcctttcaaatgcaagaaaaggctcacactggagaaaaactctatgattgtaaagaatgtggaaaaaccttcatatcccattcaagcattcaaagacacatgataatgcacaatggagatggaacttataaatgtaagttttgtgggaaagcctgcccttgtctcagcatatatcttatacatgaacgagttcacactggagagaaaccatataaatgtaaacaatgtggtaaagcctttagttattcaacttcccttcaaatacatgaaagaactcacactggagagaagccttatgaatgtaaggaatgtgggaaagcattcggtagtcccaattccctttatgaacatagaagaactcacactggagagaagccatatgaatgcaaacaatgtggaaaagccttcagatggttccattcctttcaaatacatgaaagaactcacagtgaggagaaggcttatgaatgtaccaaatgtgggaaagcattcaagtgtcccagttatctttgtagacatgaagtgacccactctgggaaaaagccctgtgaatgtaaacaatgtgggaaagcattatcttatcttaactttcaaagacacatgaaaatgcacactagaatgagaccttataaatgtaagactgtggaaaagcctttgattctcccagttcgttttgaagacatgaaagaactcacactggagagaaaccttatgaatgcaagcactgtggtaaagccttcaatcgttccagttcctttcactatcatgaaaggactcacactggagagaaaccctatgaatgtaagcagtgtagtaaagccttcatttcttccacttcctttcgatatcatgaaaggactcacactggagagaaaccgtatgagtgtaagcaatgtgggaaagccttcagatctgcctcacaccttcaaatgcatggaaggactcacactcaagagaaaccctatgaatgtaagcagtgtggtaaagccttcattttttccacttcctttcgatatcatgaaaggactcacactggagagaaaccctatgagtgtaagcaatgtgggaaagccttcacatctgcctcacaccttcaaatgcatgaaaggactcacactggaaagcaactgtatgaatctaaacaatgtgaaaaaacctttggatctgtcagaaaccttcaaattcatgaaaagacacaccctggagagaaaccctataaggaatatggaaaagcattcaacaatttctcttcctttcaaatacatgcaacaatgcacagaggacagaatgcctatgaatgtaaagagtgtgacaaagcattcatatctgccaagatccttcgagtacatgcaagaacacaccctggagagaaaccctatgaatgtaaggaatgcggaaaagcgttcaattatttttcttctttgcgtatacacaaaaggatgcacactggagagaaaccatattaatgtaaggattgtgggaaagcattcagtttgcctggttcctttcgtagacataaaagggctcacactggagtgaaaccgtatgaatgcaaggaatgtggcaaagccttcacttcttctggttcctttcagtgtcataaaaggattcacactggagagaaaccctatgagtgtaagcagtgtggtaaagccttcatttcttccactgccattcgtagacatgaaaggactcacactggagagaaaccctatgagtgtaagcaatgtggaaaagcctttatttctttcagttccattcagtaccatgaaaggactcacactggagagaaacagtatgagtgtaagcagtgtggtaaagccttcatgtcttctactgcatttcagtatcatgaaaagacccacaccagagagaaacactatgaatgtaagcagtgtgggaaagccttcatttcttccggtagccttcgatatcatgaaaggactcacactggagagaaaccctatgaatgtaagcagtgtggtaaagccttcagatctgccactcaacttcagatgcatagaaagattcacactggcgagaaaccctatgaatgtaagcaatgtgggaaagcctacagatctgtctcacaacttctggtgcatgaaaggactcacactgtagagcaaccctatgaatataagcaatatgggaaagccttcagatttgctaagaaccttcaaatacagacaatgaatgtaaacaattaaatgtttatagcagctgcatactaacatgttattctgtattttttttttctttttgagacagagtctcgctctgtcacccaggctggagtgcagtggcgtgatctcagctcactgcaagctccacctcctgggttcacgccattctcctgcctcagtctcctgagtagctgggactacaggtgcctgccaccacacccggctgattttttgtattttttagtagagacggagtttcatcgtgttagccaggatggtctcaatctcctgacctcgtgatctgcccgcctcagtctcccaaagtgctgggattacaggtatgagccaccgtgcccggccgttattctctattttttgttgttgtttgagatgagtcttgttctgttgcccaggctggagtgcagtggcatgatctcgcctccgggttcaagcaattctcctgcctcaggctcctgaggaaaaagattcctaggattacaggtgtgcaccaccacacttggctaatttttatatttttagtagagatgaggtctcaccctattggccacactggtcttgaactcctgacctgaagtgatccacctgccttagcctcccaaagtgctgggatgacaggcatgagccactgcacccagctgttattctctatttaattaattgagaagccataataaaatatctcagtgccatcatgcattagatcaagtttatgttaccacattattttttggacattgtgagtcaatattaccaagtggacaaaatcccaggcatctttttcctcatgtaaattttaattttcatgcttatatacttagaacatttatcttggtcctaattttttgttcattcataataccaaaagttatctcatgttcttcagagtgactttgtgccatatcccacagtggcatacctgtcttcaaagagggtataattcacaaaaggacttacactagaggaaaaccctatgaatgtaagctgcgtgggaaagcattttctgatctgagtggcattgaaacccacatggtattgcacatgacagataggcctctctccccgttcatttctttttttttgagacggagtcttgctctgtcgctgaggctgagaacagtggttccatctctgttcactgccacctccacctcctgggttcaagtgattctcctgccccagcctcccaagtagctgggattacaggtgaccgccaccacgcccagctaatttttgtatttttagtagagacggggcttcactatgttggccaggttcgtctcgaactcctgacctcaggtgatccacctgcctcagcctcccaaagtgctgtgcatacaggcatgagccactgcacccggccttctccccattcattttcaaagacataaaaggatgcacaataaagagagaccctctgaatgcaagcaatatggaaaagcattccattgtatcagatccttttgtagccatgaaagaactcgctgaagagaaaccctgtaaatgaagggaatgtgaaaagccttcattcctgaaatgaagcaattcatactattaatatatgagagaaatcctattataagaaattgattgctgtgcacggtagcttacctgtaattccagcacttccagaggctaaggcaggtggatcacttgaggtcaggagttcaataccagcctgggcaacatagtgaaaccctgtctctaccaaaaatacaaaaattagccaggcatggtggcgcgtgcctgtagtcccagctactcaggaggctgaggcaggagaatcacttgaacccaggagctggatgttgcagtgacccgagattacgccactgtaccccagcagagtgagactccatctgaaaaaaaaagcaaggggccggcacggtggttcacgcctgtaatcccagcactttgggagaccaaggcaggcagatcacctgaggtcaggagttcgagaccagcctggctaacatggcaaaaccccatcgctactaaaaatacaaaaaattagatgggcatggtggcacatgcctgtaatcccagctacatgggagactgaggcaggagaattgcttgaacctgggaggcggaggttgcagtgagccaagatcacagcattgcacttcagcctgggcaacaagagtgaaactccatctcaaaaaaaaaaaaaaaaaaaattgaggaagcattcagttgtcccacttcctttcaaacaggaagagacactagagagaaaccctctgagataactgactgttgaattaagaagagaggcctggccggacacagtggctcacgcctgtaatcccagcactttgggaggctgaggtgggcggatcacgaggtcaggagatcaagaccatcctggctgacacggtgaaaccccgtctctactaaaaaatacaaaaaaactagctgggcgtggtggtgggcgcctgtagtcccagctactcgggaggctgaagcaggagaatggcgtgaatccaggaggcagagcttgcagtgaaccgagatcgcgccactgcactccagcggcgacagagcaagactccgtctcaaaaaaaaaaaaaaaaaaaagagaagtctgacaggacaataaaatttagaaatggagttggaggatgtcataatacaattcaccagtgtcctatcttacatgcaatttcaaaggcagacaagaggaagtcatcagtcacattttagaggcaccaaacaggtgccacatccatacaggctgactccctgctcccagcccattttttcctgaatctttggcttgccaatcaagaatgtcctcaaaatttgctcagaggtgtgggcctttgggtaaaggtgtcttcagaagctccacattaaagatccatcagtggttaagggcaaattgaagagaaataaagactaagatatttttttaaaagactgaaagaatagaacaatgaaaaagccccatctgtaatacagtttttctttttctttttttttgagacaaggtctctctctgtcacccaggctggagtagagtggcattatcctggctcattgcaatctgggcctcctggtttcaagtgattctggtgtctcagccacctgagtagtcaggattacaggtgcacaccaccacgcatggctaaatttttgtatttttagtagagatggggtttcaccatgttgagcaagctggtcttaaactcctgacctcaagtgatccgtctgtcttggcctttcaaaatgctgggattataggcgtgatccactgtgcctggcctggtgtttctttaggtataatgtctttaccagagagctaatgcagactgtcatgggtgagattgttctctgatgttcaattcccctactttgtatattgagtcagtatgagatgcgatttgtttggcaagcacctttgttcctgctgttactgacccttatcttgtagcctcacagctactatgcttttgtccagtccaactagataggagcttcttcctctgctgcagtgactggtctcacccagggctttcaggaaggtgagaataagcaccttcctcctcccaggaagttttgagtttcctgtgtttcatttctgaatgtaatgtctccatttattttcaattatgtttgattatatttgattaaaaacaataatttttttggcaaccaagatttctgtacatgtgtcatagaaatagttgaacttttccacaactgtatactgacaaacattattctttcttaattaattcagtagctatattaaaatatgtattagatcaagttcataatgttgccaagttattggttggacattgtgagtcaatattaccatgtgaatagaatgccaggcatgctttttctcatgtaaaaaaattttactttttatactcacttatatccttaaatttttttgttgtttgtttgtttgttttttttgagacggagtctcactctgtcgcccaggctggagtgcagtggcatgatctcggctcactgcaagctctgcctcccgggttcacgccattctcctgcctcagcctcccaagtagctgggactacagttgcctgccaccacgcccggctaatttttttgtatattttttttagtagagacagggtttcaccgtgttagccaggaaggtctcaatctcctgaccttgtgatccacccacctcgccctcccaaagtgctgggattacaggcgtgagctaccgcgcctggctatccttaaattttttatcttagtcctaacttttctttttttctttttctttttctttttttttttttttgagacgcagtctcgctctgtcgcgcaggcttgagtgcagtggtgcgatctccactcactgcaacctctgcctcctgggttcaagcgattctcctgcctcagcctcccaagtagctggggtgacaggcgccggtcaccacacccggctaatttttgtatttttagtagagatggggtttcaccatgttggtcaggctggtttagaattcttgaccttgtgacccacctgccttagcctcccaaagtgctgggattacatgggtaagccaccacgcccagcctcttagtcctaacttttcattcattcattgtaccaaaagttaactcaatgttctcagtgacgtcttgccaaagaccaccagtaccatacttgttgtcaaagagggtgtaatatagtaataaatatgatcaaaagccataaatgacagtgagatatatgagaattacaaatgagtcacattactgaaaaaaatttgctcagtttgataatttgaaatatgttttcttctatactattttgagacatggttacagagtgtccttgttttgtcttgatccgtcatggtcactgaagagcattgtctcacattgcaggtgtatgacatgtgtctttccaatggcataagacttggccttgtggccgggcgtggtggctcatgcctataatcccagcactttggaaggctgaggcgggtggatcacctgaggttgggagttcgagaccagtctgaccaacatggaaaaaccccgtctctactgaaaacgcaaaaattagtcgggtatagtggcacatgcctgtaatcccagctacttgggaggctgaggcagaagaatcacttgaacccaagaggtggaggttgcagtgaactgaggtcacgccattgcactccagactgggtaacaagagcaaaacaccgtctcaaaaagcaaacaaagaaaagacttggccttgtggtgagaggaggtagctcctggacttctagacccatttttgccttatcttttttttttttttttttgaactactgagcagctgggattacaggcactcgccactacacccagctaacttttatatttttagtaaagacagggtttcactatgttggtcaggctggtcttagactcctgacctcaggtaatccactcacctcagcctcccgaagtggtgggattacaggcgtgagccaccacgcctggccaaaaaatatgcatattttaaatatgcatattttatttttgtattttttcatgaaggaaggtcaaataacaaaacaggaaaaatcctttttaagataagtgaactttaaattttcctcaaaaaaacttataattcacacctgacccaacatttcatcatccagtttttgttttgttttgtttttttgagatggagtttcgcttttgttgcccaggctggagtgcaatgccacgatgttggctcaccacaacctccacctcccacgttcaagcgattctcttgcatcagcctcctgagtagctgggataacatgtctgtaccaccacacctggctaattttgtatttttagtagagatgaggtttcaccatgttggtcaggctggtctcaaattcccaacctcaagtaatccgcccacttcagcctcccaaagtgctgggattacaggcatgagccatcgtgcccagcctatcatccagtttgtttgcagtatcacaatgttttattcagaaacatttactaaatttgggccagacacggtggttgttcaggctagggtataatggtgggatcatagctcactgcatccttaactcttgggctcaagtgattctctcgcctcagcctccaacatatgtgggactacaagcatacaccaccatgcccaggtaactgttttgtttttttttttaagatggagtctacactggcacagtctctgctcactgcaacctccaccttctggattcaagcgattctcctgcctcagcctcccaagtagctgggattacaggaagctgccacgccaccatgcctggctcatttttgtatttttagtagagatgaggtttcaccatgttggccaggatggtctcaaactcctagcttcaagtgatccatccacctcggcctcccaaattactgggattacaggcgtgagccaccatgtcctgccagattttaaaaattttctgtggagatgtgatctaactgtggtcccaggctgctctttaacttttagcctcaagcaggtctcctccctcagcctcacagtgctaggattataggcttgagccatttcaaacagccaaatttaacttttattgtggtgttgaaaggaattttgtatgtactttcttctttttttctttttttttttttttgagacggagtctggctctctcacccaggctatagtgcagtggtaagatcttggctcactgcagcctccatctcccaggttcatgtgattctcctgcctcagcctcccaagtagctgggatacaggtggccaacacgacacctggctaatttttctatttttagtaaagacatggtttcaccatgttggccaggctggtctcgaactcctgacctcaagtgatacacccatctgggcttcacaaattgttgggattactggcataagccaccacacctggcatttgtatatgcctttcttgtattactttgaccatggtaggacatatacaataggcaaatgatataaaaggccaaggcgggcagatcacaaggtcaggagttcgagaccagcctggccaatatggtgaaaccccgtctctactaaagatacaaaattagccgggcgtggtggtgggcgcctgtaatcccagctactcgggaggctgaagcaggagaaacccttgaacctgggaggtagaggttgcagtgagccaagatcatgccggtgcactccagcttgggagacagagcgagactccatctaaaaaaaaaaaaaggttaaatttaatttttgacaatcactttaacacacaacttaggtttatatggaaagagaactatgaccacttgtgaacaagtaactggtaagtaagatggaattatggcttctgtgtgatactctattgttaggcaagcacaagctccttataaaagccctcatatatgtaaatgcatcaaatatcatgtgactacttggtttcctaaggacagtttattattcctttatcccagtataattttgcatagtcatcactctctttgttatgggtatctatacttaaagaataaatatatatgagttatctacacatgagctaaatgaggttttgtaaattgaatgatatttttaggaaagtgttggactttgtcaattaccatgcctgatatcaatgtgtcttacctgactatatcactcctaaaaatttcactgcgggccgtggtccctggatttcctgagggttgattgcccatccccattcctgtagacgagcacacaatggtataagactttcctgtaacacattacagtcttcagaggttaacgtgatgtcatcaatataatgaaaccagggccaggtcagatggctcatgcctgtagtcccagtgactcaagaggctgatgcatgagaatcacttcagcccaggtgttcaaggctgtagcgaggtatgactgcatcactgcactctagcctgagtgacacagcaagacccaccctgtcaaaataaattagatagatagataaaataataaataatgaaataaaaaaatatataaaattaaaccatgaaagatgacaggaatgggaacaaagacaagcctctagccaacattctgtgacaaatcctaggactttggagataaccctggagcaacccttgaatggcagccgactcaccagggcatctttctggacttccatggattaaaacacactccaccatagcatctactaatgtgacagtcttctctctattttgggggaccagtaagtggagagctgaacatgaacccttttattccagtagcagcctggcagggtaaaagcaaattggtcttgtgattatttagagagaggaatgctgaaaaaaacattagctaaatctaacgcactgtgatgcatccccagcagggacactatgtgatcagctacctgagtaataggaactacaggatgtatggttgggggttaccttggtcaattcctggtaatctgcagtcatccaccaggtactgtttggtttgtgttcaggccagagagactgttaaaatgagtttgagctgggtggataatgtgtccacttaccagtgcctcaatagttgcacttatttctttttttttttgagacggagtctcattctgtcgcccaggctggcgtgcagtggtgtgatcccggctcactgcaagctccacctcccgggttcacgccattctcctgcctcaccctcccgagtagcggggactacatgcgcccaccaccgcacgtggctaatttttttttttttttttttgtatttttagtagagacggggtttcaccgtgttagccaggatggtctcgatctcctgacctcgtgattcacccacctcggcctcccaaagtgctgggattacaggtgtgagccaccacacccggcctagttgtacttatttcatcatgtcctccacagcccccccgcccaaaataatttgtactattatttatttatttatttatttatttatttatttttgagatggaatcttgctctgtcgcccagactggagtgcagtggtggtatctcggctcactgcaatctcctcctcccaggttcaagctatccgcctcctgggttcaagctatcagcctcccgagtacctgggactacagatgtgcgccaccacacccagctaatttttgtatttttagtagagatggggttttgccatgttggccaggctggtctcgaactcctgacctcaggcaatccacccacctcagcatcccaaagtgctgggattacaggcgtgagtcactgagcccagcctaataatttgtactctttaaacttgacaactcgcctaggagcagaaagctgttcaggttcccattttgcctgtccttgagaacagcctttactacagcacgttcaagctgaattctcccactcaagtttgcgaagtctttcctaacagaatatccatgcctaaaatgttttctaaaataggggtaataaatgccatatatgggttggggagcttcccaatacctagatgtattaaagtcctttttatctgagtcatttgtcctctataatcatcagtgtcaggccactgttcaggatttgtttctggatttccagagatgaaagtacattccaccctgtaataggattacagactattactaaggtaataatctttttatttgggggggcaacaagaaatggtgagcttgatatgggacctctggtttccacctattgcttgaacatggggttgaccttgccccagtcctaatctctgagctatggtggaatccactcctggtagagtgggacgatcaaatgaaagattgagtcatcttcctattcttccatagaggcagaagggaagggatgaaactgcagtttaggctgtagtttctaccataagggtactaataaagtcttaggttgtttgtctgtttctcttcagggtgtttctgcccccaacaaattatgccacatttgctcatgggtgactcctattggtccctttccctatctccccttttctttctgttgatttttcttttttccctttgttagcccttgttggattaccgagtttaccctgttcctgagtttctaaatttctccaaatctgcagtgcttctcccacatcatatacacattgtcccactataggactcgagaaagatagcaaagggccatgccattcctctggtgcaccctgtagcattttttaaatctgggcagtacaaactgctttactggtcccatggaaagccactcctagatggcttgcctccttcctcaacctccaagaagccccagggttacagaatcaccaggttcatatgcacactgtgcagtaacagaccaatacactgagacagcaagatttgcagcacagaaagagtttaatgatcatggggtgacccagcaagcagatgagaggggccctcaaatccaactcctcaaaaagttctgggctggattttttgttttttggactagtcaattgaagcagtgggaatggaggagaaacaaagacatctgtaactggttgtgatcaattagttgtaaacaccactgcacttggacccacactaggctgggatttttaaggggattgtggcatgcaagaggctgaaaaattgaggtggttgattgaagtacaggcaatgaaatcatcaggatgtgaaaactaccttctttggtgagtcagctactactggggtccttcagagcagctgaagtcagtagtttcactgttatgcaggacctgaaataatatctcaaagggaaaaattaacattttttaatgttcaagtttttatctatagagcagttaaggggaattatcatctagggtttacaggattctaggacgctaggcatcaaacaactatgaagggggccaggcatgggggctcatgcctgtaatcccagtactttgggaggctgaggcaagcgaattgcttgatcccaggagtttgagactattctgggtaacatagtgagaccccatctctatttcaaaaaaataaaaaaaaaatttggcgggggggtcagagagcaagctgacctaataattaatgctgaatgtgcagcaagctttgtttatttcaattttctccctccctccatcattgattaatttgacaaaatttaaagggatggcttcatcagcatttcttccgttgactgctaggacgtcatctcttctggtaaatcttcagcaggccaagcatctcttatgggtagaatgatctagtccataagggaataccatcacactgtgtcccacaattggatgatccaagtggtcccgggaatccccaggtaggatggtttcatttcttttttttttttttttgagacagtgtttcactctgttgtccagcctggagtgcaatggtgccatctcagctcactgtaacctccaccgcctcctgggttcaagtgattctcctgcctcagcctcccaagtagctgggattacaggtgcccaccaccatgtccagctaattttttgtatttttagtagagatggggtttcaccatgttggccaggctggtcttgaactcctgacctcaggtgatccacccgcctcggcctcccaaagtgctgggattacaggtgtgagccactgcgcccggcctttttttttttttttttgagacagagtcttgctccgtctcccaggctggagtgcagtggcgcagtctcggctcactgtaacctccacctcccaggttcaagcgattctactgcctcagcctctggagtagctgggactacaggcgcctaccaccacacccggctaattttttgtatttttagtagagacggggtttcactgtgttagccaggatgggctcaatctcctgacctcgtgatccatccaccttggccttccaaagtgctgggattacaggtgtgagccacgcccggcttggtttcattttgtggcccaggctggagtacagtggcctgatcctagctctctgcagcctcggactactgggttcaagtgatcctcccactgcagcctcttgagtagcttgggactacaggcacaggccaccttgccaggctaatttctctctctctctttttttttttttttgagatggagttgcgctcttgttgcccaggctgaagtgcaatggcacgacctcagctcacagaaatctccgcctcccagattcaagagattctcctccctcagcctcccgagtagctggcattacaggtatgtgccactatgcctggctaattttgtatttttagtagagacggggtttctccatgtttgtcacactggtctggaactcccgacctcaggtgatccgcctgcctcagcctcccaaagtgctgtgattacaggcatgagccaccgcgcccgaccttctttttgtttgtttgtttgtttgtttatagagacagggtctcactcttttgcccaggctggtcttgctctggtcaggctgtctccaactcccagcttcaagcgatccgctccccttggcctcccaaacttctgggattacagatgtgagccatggcaactggccttccaggtatttattgaaaggttttgcaacctctgattgttctgcagcagtatattacctgacaatgagagtcccctgcatcctttcaccccatgttgcagaagttgctgcgctttccccttttgtttgcatagtgggacaagcatgtcaatgatcctcatcctcctcttcatcaatgacttctttgtcatcagtcttcctcttcataaattgccaaggaatccaagttctcacatctcaatcgggcttacttatgatagtagcagctgtcataagtctgcatcagctcccacagctccaggctccatcaagcctgactcctttttcttccccacagtcatttcccagaagcccccagctctgcttgccaggtgccttaggctgtacagctgcactgctgctgagtccaggcagctatctgtccctgcagccccttccccaacccattcccagcccagccccactccaccactggtatctctagtgtccctgactgctagtgcctcagccaccgccgccactgcgatttggaagtcttttaatgcagttaaattatcttagttttttctctcccagtttatatgtacatacagaaggaaagcagggattctgctagtgtcttattcacacagtgagattgtagatgttggtctggtggacgtgatcagtgggggagagaagtaggtgaataacctgcagggggcagcagagcccaagaccagcctggagcctgcaaagggaaggaaaatgagctcccttgggtgtttctgagcagctccaggagtggattctgagaagctgcagagccctggaacacaggagacccaagtgcagatgcatttggggtggcggacagggggcatgcagagggggaggtgttctgtcatgtctgaggttggacctcaggagcctggggccatttggagggcagtgtttttggttttggcatgcatagggtcactgggttcaggcggtaatttgtatatatgaagaaaatctgtgaaggtcagtgtgcgagaattgtttggaacatcacctggtgaaagggtttacgaagttgacagtttatttaggttagaagcttaaactgactccaagggatagtctcctgctgttgaaaatgaagttctggaaggagggagtgttcccatactgtgaggagagatggtagatgtgtgaggaagctttgtccatgcctcatcccctactcctgtccccctggaggacatctgtctctctttcctggtctagtcgtgcctggcctggtctcggttcccctcctgctctgaggcaaacagatcgccccagcagacactgagtctggaatttcctgcatacacttgtgacctgatgcaggaggaaggagcagagaaagcccattgagtgaaggagaggtcagtgccctttctaaagttcaggaaagaggccaggcgcggcggctcacgtaatcccagcactttgggaggccgaggcgggcggatcacctgaggtcaggagttcgagaccagcctgactaacatggtgaaaccctgtctctactaaaaataacaaaaattagctgggcgtggtggcaggtgcctgtaatcccagctactcaggaggctgaggcaggaaaatcgcttgaacccgggagacagaggttgcagtgggccgagatcgcgccattgcaccttcagcctgggcgacaagagcgaaactccgtctcaattagttaatcaatcaaccaatcaatcatatatatatatgaagttcaagaaagtttggcggaaatgcagatatccaaggatcagggcacagggagggaggtgggccttaaagaggaagtgaatagaaccagtctggctctgcagggccccgttatcccgggcttctgctgtcactcagggctctgaaggcgaggcggggagcacggtccaatcaggagcgccggggcggggccctgccaacttttttcggggaaggagacggctgcaagcccgcggtctcttgttgctgtgctaacgaccgttggaaccctctttctggctcttggaacgctcggctctgagaggctccaggtttctccgccagagctcctgtcgctctgtcagttgcgctgtgttcctctctagtcacaagagccttggggaagacagttggaagctcagacatggtgagtgtgtggggccaggcgtcctgagacgggggcgaagggcttcttagaacctgctggaaccggctgtggcgggacccgggcctccccgcggcgactccggggtctgtggggctgggccggcagccgggacccggggcatcctgtctcgtcccttcgcagcgaccgcggccccggacccggagccctctttgggcagctccgcgtcttcagccgcgggtctcctcagattgtgctgggccatgaggaggatcatggggggaatcccgtctcgggtgtagggttcttgcgtcagaaaagcggtggtctgtggagtccccagtcgtcttttctcctcttaaaagttaaaatggccgggcgcggtggctcacctgaggtcaggagttcgagaccaacctaacatggagaaaccccgtctctactaaaaatacaaaattagcctggcgtggtggcgcgtgcttgtaatcccagctactcgggagactgaggcaggagaatcgcttgaaccctggaggcggaggttgcggtgagccgagatcccgccgttgcactccagcctgggcaacaagagtaaaactccgtctaaaaaaaaaaaaaaaaaaagaggcactgataaaaattcaagagtttgtgcaaatgggaattcatgaatgagaatcacgcagtcatggtttgtggtttgttaccagaaacatttggaaatattgcagttgagttggatttcagtgcccttaggtaggaccttagtgcactacacacacttcagtctgtttacttgtttaaattttttcacgctgtccacatggactggtttctccctccattttccaaatctgtgggatacagggtctcacaccctccccgctatgaccccagcctaactctttaaaggcttgcggtagcatcttacattttcagttcccttcccacatttccaaacattaactcctcttctccaattcacagtattttcaactatttgtacttttttttttttttaaagatggagtctcactctgtcacccaggctggagtgcaatggtgtgatctcggtcgccgcaacctccgccttccgggttcaagcgattctcttgcttcagcctcccagagtagctgggattaaaggcgtccaccactatgcccggttaatttttgtatttttagtagagacagggtttcaccaggttggccaggctggtctcaaactcctgaccccaagtgatccacccgcctcggcttcccaaagtgctgggattacaggcgggagccagcgtgtccggcctatttgttctttattgtacaatatattcatcctttccttcaaatagatgaagtattttaatggtgtttttttttttttaacagagaaatatgattccacaggacaatgaaaacccaccccaacagggtgaagcaaatcaaaatgtatgtggggtacacagtgcagtggggaatgacacaatacagtgttgatgagaaactgtcattgagcacatcagtgagcaggatagcagtggggttttgacaacacaaatgtcatatacccaccagttttgtttttggttttgtttgtttttggttttgttttgagacaggatttcgctcttgttgcccaggctggagtacagtggctcgatctcggcccacagctgcctctgcttcctgggttcaagcaattcttctgcctcagcctcctgagtagctgtggttacaggtgcgcgctaccattgccagctgatttttgtatttttagtagagatggggtttcaccatgttggccgggcttgtttcgaactcttgacctcagatgctccacctgccttggcctcccagagtgctggaattacaggtgtgaaccaccacacctggcccaccagtcttatttatttatttatttatttattttttgagatggagtctcactctgttgcccaggctggagtgcaatggcgtgatcttggctcactgcaatctccgtctcccgggttcaagtgattctcctgccttagcctcccaagtagctgggattgcaggtgcctgcgaccacgcctggataattttgtattttagtagagttggggtttcaccacgttggtcaggctggtcttgaactcccgacctcaggtgatctacccgccttgacctcccaaagtgctgggattacaggcgcgaaccactgcgcccagtctatacctgccagtcttacacagaagagtttcactgccctaaaaatcctttgtgctttgtgtagccatcacactcccctccctctcttccactaaccccttaatccctggcacaaccgatgattttattgcctttagagttttgccttgtccagaatgtcatgtacttggaatcatgttgtaagtagccatttcggcctgtttgtttcacgtaaaaatacgcatttaaagtatctttgtgtctatgtggcttgataacagatttattatttctttattttacaaaattttaaagagatggggtctcactatgttgcccaatgtggttggcggatcacgaagtcagaagttcgagaccagcctggccaacatagtgaaaccccgtctctataaaaatacaaaaaaattagctgggcatggtggcaggcacctctaatcccacctactcaggaggctgaggcaggagaatcgcttgaacccgggaggcggaggttgcagtgagctgagatcgctccattgtactccagcctgggtgacaagagtgaaactccatttcaaaaaaataaataaaaaataaaataaaaaataaaaattacatttggccaggcatggtgactcattcctgtgatctcagcactttgggatttaccctatacctatttgggcacacaaatcctgtaactgggggtaacccccttagggagtgaggagaatcatggaagttaggagtggtcatttattacatatgtggataataataatgttttgtgtatattaggttaaatagtataaacattgtaattgctagatttacataaattgataggttaggattgtgaaagaaggattagatgttaaaattgtgattattcaatttgttgtgagcaattgccaaataggccaagatatttcacagctgtgtttggttaaggtccccttaaccaatctcccatagtgttgcaatctcccatagtatgtttaagtctgttgatgagtagacttgaaataaaatggagatcagtgctagtttttgtcatgtaagtagaattacacttgatattagtgagaccccttgcattacttcagaagtgaaagggggatagtcctaattttatcaccagtgctgtgataattataagggatgctatttggtttagggcttttgtgattgttcattgtctggagtatatcatattgttgatgatagctactaggatctactagtattagagatgcagttgcttatgtaaggaaatactttggtggtggcttctgtggagcaggcactttttcagttagaatggggataatggctagcatatatctaacctcattcagattaggagccagtgtaagtccattattataatcagagtctctgtgaaaataatataaagagaatagtgaggagatgtaggggatgaatttgaataggaaggatataaacattttcaaggtatgggctgggtagcttatttagcttaccctactgtaggatatggtgtcctaggtaccatggagaatctggaattctcaggagtgggttcagttcctacagttctagtaataagagggtttaaacctctataatttattatattaaagtaaccattctatcatacatattttttatgtttgtggtgggatactagatattaggatgggcattgagatatatgcacaggactcatgtctggggtaaacagttttttcacagaagatgcttaagttgggcatttggtcggtggggacccacgcgggttcaacatgcatatcgagaagtgttatttctgtttggggcccatctaccctggccatggcattatgttcttctgcaacaattgcaaggtgttcagattttgtaaatctaaatgtcataaaaactttaaaaagaagtgcaatcctcacaaggttaggtggacgaaagcattccagaaagcaactagtaaagagcttacagtggacaattcatttgaatttgaaaaacatagaaatgaacttatcaaatatcagcaagagctatggaataaaactattgatgcaatgaagagagttgaagagatcaaacagaaatggcaagctaaatttataatgaacggattgaagaaaaataaagagctacagaaagttcaggatatcaaagaagtcaagcaaaacatccatcttatcctagccccttttgcaggcaaagagaagcagttggaagagaaaatggtatagcatttacaacaggatgtggacatggaaggtgcttcttaaaaatctctgtaaccatttctttatgtacatttgaaaaagccccttggagaattagaactgctaaattcttagtttattttttacataaggtcactcaaatgaaaagtaattaaaatatatttttcctacattactgtctacaagacatcagatattacggatgttagattgcatctcagtgttaaattttcactgacagatgtacttatgtaaaaatcatgaaaattctgcttataactatagaagtgaattgtggatttaaatggttatgctgtttggataatggcacgcggcgcatttctgtaataactgatggcaaaaattcatggctagtgatgtacaaaataaaatattagttagagtaaaataattcacttaaagttatagaaggggaatacaacaaggaactaacaattgtatgacagtgtcaaatattattttgattttagtatttactgttttggtttatttgcatcttagaagagcataatggcattgtttgatgaagcctcattatgctggactgttttgacctgtttaattgttctgataggtagttgtagatattggggatgagaactgaacaatctttgcctgaaatggcactgctctctagaatttccactttggagaatactcagaacttgtgattcctggtagaacaactttttttctagactagcaactatctagaagcagaggaatctcattgccttttaaaatctattatgtggttttcttttaaaaagctcttgtttttggaaagtagaatttaggggaaaacatctgttcattatttgcatgtaaaaccagtttaaaagtaagaaaaaaaagaacatgcataagttgatcataccaaaatcatgggtatgatacctgaaacctgaattcataagaataaaattgttttttactttctttctttttttttttttttttagttggagtcttgctctgtcacccaggctggagtgcagtggcgcaatctcagcttacggcaagctccgcctcccgggttcatgccattctcctgcctcagcctcccgagtagctaggactacaggcgcccgccaccacacccggctaatttttgtatttttagtagagacaaggtttcaccgtgttagccaggatggtctcgatctcttgacctcgtgatctgcccacctcggtctcccaaagtgctgggatgacaggcgtgagccaccatgtccagctgtaacttagaactatttaaagaggcaaaggcataggagaataaaggaaggaagaagtaactcgtggaatgttgcgaaaggaaaaacacgtttaaggaagaggaacaggctatgacttaatgtttgcttggaccagtataagcatgccagggcaagtatttaggctaacttgtgggagttaagaatataaagttgccaagaccagcttggctggggagacgctaacccagcagcgctagaggaattaaagacaccacacacaccaaaatatagaggtgtgaagggggaaatcaggggtctcacagccttcagagctgagagtcttgaacagagatttatccacatatttattaacagcaaaccagtcattagcattgtttctatagatattaaattaactaaaagtatcccttatgggaaacaaagggatgagccgaattaaaggaataggttgggctagttaactgcagcaggagcatgtccttaaggcacagatagctcatgctactatttgtggcttaagaatgcttttaagcggttttccgccctgggcgggccaggtgttccttgccctcattctggtaaactcacaaccttccagtgtgggtgttagggccattatgaacatgttacagtgctgcagagattttgtttatggccagttttggggccagtttatggccagattttggggggcctgctcccaacatgtcccctttctttgatttgcaaatcaataaaagcaagggcagctttgtcacagtgagctacttctcgcaggagtcaggatccacgtctgcagactatacaaggacaacacagattaaaagcacagtcatcattgaaatcacagaacttccaagtgtttttatccattttcagctccttttaagcactccagttctggcattaaggtcagctgtgcctgggatgctttaaatatttgttcttttaattttaaatccttatattaagctcctacaatgcaccatatcatttgaggttgaggtgccactataccgccatggttccagataataggaacttttgccatacttcttatcatttctgccatctgaccgttttgttcagatcagctgaacatagtgtggccgtggcatgtagactgagaggtgcagtttaagctaaacatccccttaggggaccaattaataatgattccatagaaattgttgtgcagcacctctgcctgttccgcaatgcaatcttcctaaacaagtacgttcattttttctaactgggtccgatcctgtttacaaataggtttttgagggcggtatgcctcaattataggagcagatttattacggtaaatactgagattagaaagcatgtgtaactgtgtcatagagtgattgcatccaggcattattaccagtcaagattgataaatatgcccagtaagtataatcattctctgtgtcagcccttattgaaggaatactcaaggtagtggtgataactgctgtcatagctaccattaaattattcattgtgactggttgtcccgctttcctcaggttttcttccgccatctgtgacagcttcttgatctgtccccaggtgggtggctgtgttcgatgggtgttgctcgtgacagttggggtcctcctcagcgtcagtctctacatggctgcaaccggggagtccttgggatcctctcagagtctcttcctcagcatctggctcatgataaggtttcaggtgtcttgatagtacccaaatcggctattgattttggtctagagaaacacaagcataatctctactccaagttattattttacctatttcccaactttttgttactgaatatctccaccaaatcagttgttctgcttctttctttgcagctggtttctgtagatgctgttcagttgctgataacatctggcctttgggcaggttcaaaacatttaatgttaataatgctacgttcagttgtatctgtggggttccatattctctatttccccctttctgcttttgcaactgctgttttagggaaagattcattctttccactatggcttgtccttgaattgtatgggatatcagtaatgtgtttaatattccacatagagaaaaatgtagctagagcttggctagtatagcctggggcattatctgttttaatagaagctggaatgcccatcactgcaaaacactgcaaaagatgacgtttaacacaagcagaagactctcctgttggcatgtagcccagacaaagtgagaaaaggtgtccacacatacatgtgggcaccaaacgagggaatatgtgtgacatctatttgccaaagagagttaggttccaatccttgaggattaaatcctcctgtaaaagatgaggaatgtaccatttggcaagttggcatcgctggataatagctttagcttctttccaggtaatgctgtatctgtgtttgaggccagaggcattaacatgggttaaattgtgaaagtgtctagcattagatattgcattagcaactaggcgatcagccatttgattcccttcaatcaaaggtcttggaagaggtgtatgagccctaatgtgagtgatgtaaaaagggtgcattctacttctaactgctgtttgcaactgggtaaataaagtaatcagttgttcatctgtatgaaatcgtaactgcgcattttcaattaactgtgtggaatgaaccacgtatgaagaatcagaaatcacattaatagacatatcaaaagcagtcaatacctcagttacagctacaagctcttgctttttgagctgaagtatagggcgtctggaaaactttactttttgagccagaataagaagctttaccattactagacccgtctgtaaaacaatgaaaatgcttagcaggctgcaggttgtttactgcaagaattgtaaatgcaaaccattcacagttttgctcagctaaatggatagtaaagaaacagtctttcaaatatatgactattaaaggccaattttttggaattatagtaggagaaggcagtcctggctgtaatgctcccataggttgtataactgaattgatggctcttaagtcagttaacattctccatttacctgatttttttcttaattatgaaaactggagaattccaaggggaaaatgttggagctatgtgtccattttgtaattgttcaatgactaatttctctaaagcctccagtttctctttacttagcggccattgttctaccaaattggcttatctgttaaccattttaaaggtataggttctggaggcttgacaatggccaccatcaaaaataataccctaatctttggcaggaactttctttctgcttgaagcagttctttcaaaccttgcaaatttttttctagtcccataccagggacataccccatttcatgcattgtatgttgactttgagggctatataattgttctggaattagaacttgtgctccccattgtcataaatctctcccccataaatttacaggtacagaagttataattggttgaatagtaccaggttgtccatcaggcccttcacaatgcaaaatataactactttgatatactttaggggctttaccaactccaactatgttaaattgagcaggttgaattggccacgtggacggccagtgctgtagagaaatgactgaaatgtctgctcctgtatctaccaaacctttaaatttctttccctgaatagttattttcacaggtaggatgtttatcagtaatttgatttacccaataagctgctttgccttgtttatttgtgcttccaaatcctcctgttcgtttaatttcacttttccccatttccacatacgacacaatcaggagctgtgctatgtgcgctctcctggctctgctttccagggaacagaagtagatacaacaatttgaatttcccattataatctgaatcagtgtctcctgtatgtatttgtacgtcttttaaacttaaactagaccttcctaaaagtaatcctattgtccctgctggcaagggtccgcagactcctgttgggaccttttgcgggggttccccaggcagaaggctcacagcttttgtgcagcataaatctactgcagcactactggctgtgggggggtggacagacattgtacaggggtgagggaatggcctgagctagaaatgccccggtttagaatggggccctcatggcgtttcccgaaatcgggttcccttctttatcaaacttaggatgacattggttaacccaatgttttccttttttacattttggacatatttcagaatcagcagttttcttttctccccatctggcggcctgactcgctgatttttttctacattcttttttagtatgaccatgcttcccacagttaaaacaagctccaggaagtggagtatttcctttatccactctcagtcctgccattgcctatgccaacaaagtagctttatgtagattatctctgatatcatcacaggccttgataaaatcaactaaatgtgctttccctctgataggtcacagagcagcctggcaatcgggattagcattgtcgaaagctaataactgcaacactatatcctgagcagccaaatctgcaatcatctttttaagagactcctgtaactgagctataaagtcaacgtatggttctttggatccctgttttatagcactaaaggaagggtattgttctctacctgaagtgattttttcccaagctctaatgcacactcctctaagctgttctatggcatcatcccgcatgaccagttgtgcatctaaaccagcccagcctccaacccccaaaagttggtctgcagttacattaatttgagtttgggcctgggcattgcgagcagcctgaatggaagcttcatctgcccaccaaattttaaattttaagaaccgagcaggagttagacaagctcgagtaagagcatcccagtcagtaggtatcatccaactggaaacagcaacattctttaacagtcccattataaaaggagaacctggtccatactgatgtatagctttttaaaattctttgagtaatttaaaaggaaaaggctcaaatgtagctgtaatatttccctgttgatcttggggggtgtattcattctaacagggaactgccaagcctctgtatcaccctctcctctagcttgctgaattcctgcctgaatagaactaagagtggtcactcggcgctgctcaaacagtcactggggcaactacttttcgcccagtgtcctccagaaaagaaagatctggagggtctttttcttgaaaataataaggagggggtacagaagggtagggatgaatctctccctcctttcctgctttagctttaactggcaaataaacctcgtctgtaacctcttctgttacttcattattcactcattcctcctcatcatcagtgtgaagaagttccaaggtgaaacgaaccagaccccatacttgtcccattgttaccctgaggcttccgagctccccttcttactcaccatggggattgctttaagagtactcgggtgtcctccagctagttttccgttccaaccattgctctggcgacccttcaacctgcattcaagcccccatgaatggacgccacttgccaagaccagctcagtcggggagaccctaacccagcggcgctagaggaattaaagacaccacacacaccgaaatatagaggtgtgaagtgggaaatcaggggtctcacagccttcagaggtgagagccccaaacagagatttacccacatatttattaacagcaaaccagtcattagcattgtttctatagatattaaattaactaaaaatatccattatgggaaacaaagggatgggccaaattaaaggaataggttgggctagttaactgcagcaggagcatgtccttaaggcacagatagctcatgctgttatttgtggcttaagaatgcctttaagcggttttccgccctgggtgggccaggcgttccttgccctcattccagtaaacccacaaccttccagtgtgggcgttagggccattatgaacatgttacagtgttgcagagattttgtttatggccagttttggggccagtttatggccagattttggggggcctgctcccaacataaagtatattgatgttttttttattacagctagtatatatttaagaatgttagtataggattttgaataaattttgtttttaagagaagttataatttaattagatggggaggaaagtctttgaagaggaacctctactttactttttataaagtgattctcctgctcagtctccccagtagctgggattacaggcatgtgccaccacgcctggctaattctgtgtttttagtagagacagggtttctccatgttgttcagggtggtctcaaactccttacttcagatgatctgcccacctcagcctcccaaagtgctgggattacaggcgtgagccaccatgcccagcctgtagtggttctttaatgagcagctttattgctttggcaaaaggttggaataatccatatgagcctatgatgttaggtcccttacagagttgtatgtaacctaaactattcattcaacaaatgttaagattgctgtagtgagaatggtgggaaataagtaggagaaggttaattataaacttattgttaagaagaaggattagtttactttgactagtacgtcttagtcaaaatcattttgaggttatattttgctctgaggtcacctcaactaaaatttttagttcattggatacaatgttaatacctgttaagttaggttaattattggatatatggactaataaatttaagttccgtagagtcttctcatcatatttaagtatttctgcctcttcacagataggtcaattgcactgattaagagacagctaaaccctcatgtgaccagtcttgcaagtctctgtttcgggaacaaatgattatgctatgcctgtacagtcaagatactggcaccattaaacatgtcactgggcaggcagtgccagtttttggtgatgtttttggtaaacaggcagggtttggttttgctgagttccttttattttttaaaatctttctttagtgcttgcctttgttggcttaacaatttggagaaaataattagtttataggtttgcttagttatattgagttttgttaactgtcagtggatcatccaaatatgatggtaactatgcatttttatacatattttatttatttatttatttatttatttatttgagacgaagtttcactcttgttgcccaggctggagtgcagtggcgccatcttggctcactgcaacctctgcctcccgggttcaagcaattctcctgcctcagcctcccaagtagctgggattacaggcatgagccaccatgcccagctaattatgtatttttactagagatggggtttcaccatgttggtcaggctggtctcgagcacttgacctcaggtgatccgcttgcctcagcctcccaaagtgctgggattacaggcgtgagacactgtgcccagcctttatacatattttatagtaggttgtagaagttccctcgtattcctgattatttctattttgaaggagtgttgaggtttgtcactttttttttgcatgtgtttagattgtggtttttgatgttgattctgtaactactgtgtattgcataagttgatttttgaaatgtaagcaatgttgcttccatgaattaaattccactttgtcatggagtacagatgttgtcatatatgggtggattctctttgcaattatattgctccggctttgtgtgttaacatttaaagagatattcatgtatagtattatagtctagcattataatatgcatatatatacacatttatatacatgcacacataaagtatatatagtatatagtctagttatgatagataacataaatattatatataacttgtaatgtggtatatagctgttgtatataaatggcattatagtaaacaacttaatgaattatgacattatagtatataaaattgatatagttttagtctccagtgtatagtgggtttcatttctatgtcagcctgcagaattattcaaataccacattctcatcctcccacgggaacaaaggaaaatcttaccctcttgatgctacagtgtgccattcaaaaatattcgtgatcatggatttaggaaagattctatgatatgacaatacaagcactaggaacaaagaaaaagtatgtaattgagactgcattgaaattttaaacttttttgtgtttcaaaggacaccacaccaggaagacattgaaaagcatatagccatgccagcctgaatgcacctgatcttttttgatctcagttcctgccaggattgggtctggttattacttatatgagagtaatactgggaatactgagtgctgtacactttaaaaaaagaaaaggggccgagcgctgtggcttatacctgtaatcccagcactttgggaggctgacgcgggagctcaggagttcaagactggcctcaaaaacacggtaaaccccatgtctaccaaaaatacaaaaaattacctgggagtggtggtgcacgcctttggtcccagctactcatgaggctgaggtaggaggatcatttgagcctggaaggtggaagttgcagtgagctgagatgatgccactacaccccaccctgggcgacagagcgagactctgtctcaaaacaaggtagagaaacttgatgaattatcatgggttgaggaaatggaacttgattgaatatcaagttttggggggattctccctgaactcccttagaaggatttttgatgtaactgggctctgcaggagaaggacaaaacgggtcaagaagagggcctaagcagcctgactcatgtttggtcaaggaaggaagaagtccgtaagactcccgtagctggctctttttaggaaggacaatccctaaatatttgatttcctcgctatattccaaaatacccgctttccctctctaaaggacatcttcaattatggatccaccctgacatatttgaaagagctgcagtattttaattgatttttatattcccacagagccatatatgactctctttaaaattttattatgttggctgggtccattggctcacgcctgtaattccagcattttgggaggccaaggcgggcggatcatgaggtcaggagatcaagaccattctggctaatatggtgaaaccccatcactactaaaaatataaaaaaaaattagctgggtgtggtggcaggtgcctgtagtcctagctacttgtgagactgaggcaggagaatgggtgtgaacttgggaggcggcgcttgcagtgagccgagatcatgccattgtactgtagcctgggcaacaagagcaaaactccatttcaataaaacaaaacaaaaaaacccacaaaaattagctgggcatggtcgtgggcacctataatcccagctactcgggaggctgaggcaggagaattgcttgaacccaggaggtggaggttgcaatgagccaagattgtgccattgcactccagcctgggtgacagagcaagactctgactcaaaaaaaaaataagtacacctaataattcctgatgttaagcaccttttttatgtgtgttgtggtcatttggatttatcttggagaaatgttattggactacattgcctatcttttttttttttttttttttttgagacagagtctcgctgtcttgcctcggctggagcacaatggcatgatcctggctcactgcagcttctgcctcccaaggggctgggattatgggtgtctaccaccacccccagctaatttttgtatttttagtgtagatgaggtttcaccgtgttgccaggctggtctcgaactactgacctcaagtgatctgcccgcctcggcctcccaaagagctgggattaagctgtgagccactgcacccagcccattgcccatgttttgatcaagtagttttatacttgggacagtaatttgtttatttattattttttttgagacggagtctcactctgttgccgggctagggtgcagtggcccaatctcggctcactgcaacctctgcctcccaggttcaagcaattatcctgcctcagcctcccgagtagctggaaccctgggtgtgtgccaccacacccagctaattttttgtatttttagtagagacagggtttcactgtgttaaccaggctggtctcgatctcctgacctcatgatccacctgcctcggcctcccaaagtgaatttattatttttaattactataaaataaaattacattttattagcttaagcaattttaagtgtacagtttacttagacagctctgtgtaacttatctaagatgaatcataatctgttttgtgtgtgactaccattgtgtaatttctatagcatcgtgaattttcatgtatgaagcatgggacagggtgttattttctaagattaaataatatttcattgtatgtagatgcctaccacatttttgttatgcatacaaccatcagtggacatgtggatggatccagctcttggctattgtcaacagtggttttcaaatatgtctccatgatctggttttctactttttttttttttaattcagtataaatagacctacaagtcagctattggaagatatggtaattttgtttgtttgtttgttttttttgagactgagtctcactgtcgcccaggctggatggagtgcagtggcgcaatcttggctcactgcaacctccgcctcccagattccagcaattctcctgcctcagcctcccaagtagctgggattacagatgtgtgccaccacacccggctaatttttgtacttttagtagagacggggttttgccatttttgccaggctggtcccaaacccctgacctcaggtgatctgccctccttggcctcccaaagtactgggattacaggcatgagccaccattcctggccatgattttgttatttttaaaggcactatcatactattttccagaagggctgagccatttataatccttgggacagagcacatgggttgccttttccctctgtgaatggtgtcctctcataaacaaaagtttgttttgtttttgttttcagacagagtctcgctctgtctccatgctagagtacagtggcacgatctcagctcactgcaacctccacctcctgggttcaagtgattctcgtgcctcagtctcccgagtagctggtgttacaggtacgttccaccacacccagctaattttcttatttttagtagagacgggtttcaccatgttgcccaggctggtctcaaactcctggcttcaagtgatttactcgcctcagcctgcgatagtgctgggattacaggcatgaaccaccacgcctgttcacacaaacgtttttatgtttgataaatatttgcctttttgtcacgatttggcaccctggggtttttacctctcaatcttgttgacattcagctttgagcaattcagttacaatttaggctttactacccaagcagagattcccagaatcgtttcttctcatgagtttggtttttttttagttatttataactgtcttattagttagattgatgggcccctcgcaaaatccagttttttgtttgtttctgttgctggtatttagaacgaaatctactttctagatatcatgaaagtttaaacttgggaacagacattttcaaggatacacagcctcaagactcctcatgttaacttttttctgcatgcgaatttacaggactttgttacagcagctactacagatccacactacaaatagacattaggggcagcccagaaagcacatctttctgtgtggattcaccggaaactcatacattttcctattctgctgttcctttaccccatggttaaattgtagcatcggaattgctttatggaagaaagtgagtataggcagcgtaagaggtctgatgaccaagtcatgaaatctttggagtccatagcatcatgagaacttcttgggaatagggtatagatgcccagtgatatcagtctcacccatccttctctacacatatgggatgttttaggactcagtggcctttgaggatgtggctgtgaacttcaccccagacgagtgggctttgctggatccttcccaaaagaatctctaccgagaagtgatgcaagaaaccttgaggaacttggcctctataggtaacggtgacaatattactccctcagtgaattagagaagtgtttctcattcatcagtgctgttgagtaatttggaatatggacaggcaatactttgatgagtaagtgaggcacggttgtagtgtatcatgaacatagaatcaaataatcatttcataattttatactaatccaggcctgtgtatctgcgcctgtattttagggaagaaatggaaagaccagaacattgaaaatgagtacaaaaatcccaggagcaacctaaggtaatctgcactcacaggacaaagcagtgtctctagaaaattttagagtgggaggaaatgttaaaaagaagggaacaaacaaaaaagctgagttccattatatttattcttagaatattttctctaaaaacatgcatttatttgtgacacaggctggacaccatggcttatgcctataatcaaccctttgagaggttcagaccagaggattgcatgagcccaggagtctgaggctgcactgagccatgatgacatcattagactgtagcctgggcaacagggcaagattctcagaaacaaaattaaaagacaaagagtttttgtatgtgtacagtagtttacatggaaatcgtattaagctccatatattttttgataatagatacggctgggccatctggtagaccatgtggtccattcatgttcaaacaattcagacagagtagaaagcctacactttgctggataatgttaaaaatgcaagtgtaagacttgtgaatgaatataaaatcactgataaacccattaaatgtgcttttcatttttcacagaggtcttatggaagagagactctttgaaagtgaaggtcatcagcatggagaaattttgacccaggttctggatgacatgctgaagaagaaaactggagtagaatcatgtgaaaggaatgtgtgtgaggtcagcatgggtcatttatcccttaataagcacaccagagctgacactggacacaagccatatgagtatcaggaatatggacagacgccatataaatgtacatactgtaagaaagccttcagctgtctcccctacttttgcagacatgtaattgcacacactggagaaaaaccctatgaatgtaaggattctgcgaagacatttagtttttccatttattttcatagtcataaaagagctcactctggagggaacccctatgaatgtaaacaatctggaaaaccctttggatgcgcctcagaacttcaaatgcatgcaaggactcagtgtggagaaaccttacaaatgtaagaaatgtgaaaaagcatttaataacttatcttcctttcaaatacatgaaagaatgcacagaggagggaagtatcatgcctgtaagggttctgggaatacataccgtttttctggtttctatcatagacataaaatgcctcatgctggcgggaagttttatggatgtaagaaatgtgggaaagcctttattagtttctgtgcctttcgataccatcaaaggactcacactaaagagaaaccctatgcgtgtaaacaatgtgggaaagcctatatttcttacacttcttttcaatatcatcagttgaatcacactggagcgaaatgctatgagtgtaagcagtgtggcaaaggcttcgatttgcccaattccattcgatatcatgaaatgactcacactggggagaaaccccatgaatgtaagcaatgtgggaaaactttcagatgtgcctcaagcctccgaatacatggaaggactcacactggggagaaaccctatgaatgtaaacagtgtggtaaagtctctcgttattggagcggccttcaggtacatgaagtaactcatattggaaaaaagctttatgaatgtaaggaatgtgggaaatcatactatagttctggttcctttctaaatcataaaaggatccacaccagggagaagtcttatgaatgcaaggaatgtgggaaagcatttggtaatcccatatcctttcaaaaacatgaagggagtcacagaaaatggaagccttatgaatgtaaggaatgtgggaaggtattcagtttttccagttcccttcggagacatgaaaggacacacactgaaaaactctgtgaatgtaaacagcatgggaaaggattttttcatagaagctgtcctagacacatgaagatagacactggagagatacttcataaacgtaagatacgtggaaaagtctttcattctcctagttcatttcaaacatgtgaaagatctcacactagagaaaaacgctataaatgcaagcaatgtggaaaacccttcatttatttcaatgcctttcaacgtcatcaaaggagccacactggagagaacccctatgagtgtaagcaatgtgggaaagcctgtatttcttccactgcttttcagtgtcgtgaattgagtcacactggagcaaaacgctataagtgtaagcagtgtggcaaaggcttcaatttgcccagttccattcgatatcatgaaatgactcacactggagagaaaccctatgaatgtaagcaatgtgggagagctttcagatctgcctcacacctacgaacacatgaaaggactcacattggggagaaaccctatgaatgtaaacagtgtggtaaagtctatcgttactggagtggccttcgaatacatggactaactcatattggaaaaaagccttatgaatttaatgaccgtgggaaatcattctatagttccaatttctttctaaatcataaaagggtccacactagagtgaagacatatgaatgcaaggaatgtgggaaagcatttgataatcctacatcctttcaaaaacatgaagggagtcacagaaaagggaagtcttatgaatgtaaggaatgtgggaaggtattcagtttttcccgttcctttcgtagatatgaaagggcacacactggcgaaaagccctgtgaataaacaatgtgggaaaggatttttcatatcttctgtggagctttgaatgcatgaaaagacagactacagagaaatgctaaatgtaaggcgtgtataaaagcatttagtaatttctcttccttgcttatacatggaaggatgcacactggagagaagccatatgaatgtaagaattgtgggaaagccttcacatctgccaagagccttcaaaatcatggaaggacacacaccggagagaaaccatgtgaatgcaagcaatgtggcaaagctttcatttgttccagttcctgtcagagacatgaagagacacattctgttaatatgcattcagttatcctaattcctttgaaacacagaaaaagagtagggaaaggacctctgagataactgttttctgagttgagaagagctacttgtgaatggacaattaaatctagatgtatttagatctgatacaattcatctgtagccaacctttttttaaatttttttattttttagatggagtcttgctctgtcgcccagactggagtgcagtggcacgatcttggctcactgcaacctccgcctcctgggtttaagcaattctcctgcctcagcctcccaagtagctgggattacaggtaaccgccatcacgcctggctaattttagagatggagtttcaccatgttggccaggctggtctcaaactcctgacctcaagtgatccacccacctcggcctcccaaagtgctgggattacaggcgtgagccactgcgccctgccacctatagccaatcttaatgagatttcataggcacagacaaggaaggttatcagtcacatattagaggcaccacacagggagagcagtgtgtggccacatgcttcagcccattttttctgattctcttgcttgcaaattaagagtattctccaaatcacttgactttccttttctcagagttatagttctccagagatgtcaccagatgattcacattaaaggtacatttccagttgacttttttatttcagatattagtaaatgattaccagagaactaattcaaactgtcatggttggaaatactctgatgctcaactccctaatctatagagtgagttaaggtctatactcttttgcaagcattgttctagtggcagtgaccctgttcatgattcagcctgacatttactatgctgccctgaaaaccaactagatgggagcttgtttctctctgcattgtgtagtgagtggtgtcacccaggactttcatgtgagaaaaagcaccttgcttttaatctgggaattttgagtgttttttgtaatgcctcagtttattcttatttatggttgattatatgtgatttagaacacttgctatttatgtctgatcccacaaatcagcactcactttatttgcaaagcaccaaatttcgtgtaagaggtgtagtaattgggaatgtgaagctaagttacattctttctctttatttacatgtctccctttctataggcctctttttccccccctttttgagacggagtctctgtcgccaggctggagtgcagtggcgcaatctcagctcactgcaacctccgactccctggttcaagcaattctcctgcctcagcctcctgagtagctgggattacaggcatgcaccaccacgcccagctaatttttatatttttagtagagacaaggtttcaccatgttggccaggaaggtcttgatctcctgacctcgtgatctgctcactttggcctcccaaagtgctgggattacaggtgtgagccactgtgccctgcctctataggcttcttaaaccatttactcaaggcatatgtcagaccctggtcaaagtaatacaaaaaaggtatatacaaaaattgtgttaactccaaaaggtggaatgtaactctttgagaactactccaataagtaaactcaggtattatacacatataggaaggagaactgttgccactggtgaattgttcgtagctttcactctcctcatgggtattcatttttaaagaaagtctccctctgtcacccaggttggagagcagtggtgcaatcatagctcactgtagccttgaactcttgggcttctccagcctcagccttctgaagtagctgggaccacaggtgcttgccaccacacttggctaatttttgtattactggtagagatgaggttttgccatgtggcccaggctggtcttgaactcctgtgctcaagcagtctttctgtcacggcttcccaaagtgctgggattatagctgtgaggcattgtgcctggctctgcctcagcctcttcagtagttggaagtacaggcacaggccacctcggctagctaacttttaaaattatttaataatttgtcttttaatagcttttgtagacagtcttactctgtcacgcaggctggtgtgcagtggcaggatcatggctcactgcagcctcgacctccctgggctccggtgatcttcctatctcagtctctcaagtggctgggactacaggcatgtgacacaacacccaggtaatgttcgtattttttgtagttacagggttttgccttgttgttcattctggtctcaaactctgggttgctaacaatcctcccaccttggcatcctgtagtgctggggttacaggcttgagctatggcactcggcctcccaggtagttgttgaaaggcctggcctgaggccaggcgcggtggctcacgcctgtaatcccagcactttgggaggccgaggcaggcggatcacctgaggtcaggagttcgagaccagcctcaacatggagaaaccccatctctactaaaaatacaaaataaccgggagtggtggtgcatgcctgcaatcccagctacttgggaggctgaggcaggagaattgtttgaacctgggaggcggaggttgcagtgagccgagattgcgccattgcactccagcctgggcaacaacagcaaaactccgtctcaaaaaaagaaaaaaaatgaaaggcctggcctgccaatggttcgagtggcctctccccccacccatccacggtccctcccttcaggtaccactgcaaatttgcagagggtaacagaggctgaggccagtatggaggctgcagagggagggaaatggagctcccatgggtgcttcctgggcggcccaacctattctgcatgtggcctccagctgttcagagcagctccaggagtgtggattctgataagccgcagagccctggaaagcaagagactatgtgcagatgtccttggcagggcgctgtcccttctgtggttggacctctggagcctggggccatattcgggaacagtgttttggttctgacatgcatagggtccctggggtcagacggtaatctgtatatatgaagaaaatctgtgaaggtcaggtttggagacagaattgtttgggacctcacctgcagaaacagtttatgaagttgactatttagctcagaagcttagactgtcacctggtaagagtttcctgctggtaaatgtgaaggtctggaaggagggagcatttccacactgtgaggaggggatgggggagtatgagagaaagccttggctatgtctcatcctcagttgccaccccctgaaggacacctgcctctccctcctggtccaatcatgcctgacctggtcttggttcctctctgactctgaggtgacgagattgccctgctggacactgagtctggaattcccagtacacacttgtaaccccaatggagaagaaaggagcaggaacagctctttgagtgaggaaaaagatagtgccctgtctaaaattcgggagcaaatttcactaaaatgaaaatatccaatgaccaagttgtagggagggagctggcccttagatggtggctagaacccctcacttctgctccccaggtccagttacccagggcttctactgtcactctgggatgaggggatgggggcctggacctctgtccaatcaggagtgctggggcggggccctgccaactgtctgtcctgggaaggtggggacgcattcccgctctcaccttggtgaccttgcctactgagattgggatccagtctttcccgctgtgaaagggaccaggtccctacaccacaactgccgtcgctctgtcgcctgcactgtgacctgcactagtcacgggagccctagagagataagccaggacgcctggaaatggtgagtgtttggggccagctacccgaaacccggcaggggctgggtggaaacggccagaaccggctgtgacgggaccccaggccccctgcaggcgacttcagggtttgggacccgagttctggcacatctcggccctcagtctcctcggccgcaaggtggggttgtgccagcagccgggaccttgggcgtcctgtcccgtccctgcctggtgactgcggtcccggagccctctgtgggcagctccgcccccgcaacctcgcgtctgtgcgggggccacacatgacataaggagagtcctgccttgggtgtagggttcgtgtgggaggagctgcggtccctggggcccccagtacgtttttttcctgttaaactgggccgggggtggtggctcacgcctgtaatcccagcactttgggaggccgaggcaggcggatcacgaggtcggaagatcgagaccatcctggctaacatggtgaaaccccgtctctactaaaaatacaaaaaactagccgggtgtggtggcgtgcgcctatactcccagctactcgggaggctgcagcaggagaatggcgtgaacccgggaggcggagcttgcagtgaaccgagatcacgccactgcactccggcctgggcgacacagccagactccgtctcaaaaaaaaaaaaaaaaaaaaaaaaagggagcttctgggttgctgaacacatggcgaggctgggatggtgggacacccagagagagcagggaggctctgtatccccctactccacatcttgctctatcatcctcatctggctgttcagctatatcctttgtaatgtcctttacaatatataggtaaacaaaaaattaaactgaggcactgttaaaaattaaacagtttgaacatatggtgatttatgaatgagaatcacccagtcgtggtttgtggtttgttatcgaaaaatttagaagaattgcattttagttgtgtttcgattccttaggtagaaccttagtgcactacaaacactttggtccaattgctgctcttaatttcttcacactgcctatggggactggtttatccctgcattttcctcatctatgggatacagggtctcaaatcctcaaccctgtgaccccagcctaactcttgtagtaatgttaggaaattttcaatttcttccccaaatctccaaacgttaaccctttttctccaattcacagtattatcaacgatttgttctttattgtagagtatatttcttcatcctttctctcacatcgatgcagtttttaatggttatcattttttcacagggtccatggatgacaatttaaaaatatttgtgttgtttctgaacatttcacataagaggaaagtagagaataatcatgttacacaccagtgaaaaaacccttattttatttatttattttatttttttttgtgagacggagtcttgctctgttgctcaggctgaagtgcagtggtgcagtctcagctcattgcaacctctgcctcctgggttcaggcgattctcttgcctcagcctcccgcgtagctggcatccaccaccacgcccagctaattttggtattttttagtagagacaggatttctccatgttagccaggctggtcttttaactcctgatctcaggtgatctgcccacctcggcctctcaaagtgctgggattacaggggtgagcaactgcacccggcccactgatgtatttcaaacaggttaccttatggtgatattcagtctttatttaaggatatatgacatctttccatttattaccctttactttgatgtctttcagtatatactttttgcataataattattttatatccttcctgagaattttagggatttcaagaaagttaattgtggttgcagtggctcatgcctataattccagcactttgggaggccaaggcaggcaattcacttgaggccaggagttcaagaccactctgggcaacatggcaaaaccttgtctttactaaaaatattaacataaaaattagcagccgggtgcggtggctcactcctgtaatcctagcactttgggaggccaaggcaggaggattgcctgagcttaggagttcaggaccagcctgggcaacacagtgaaacctcatctctactaagatacaaaaacttagccaggcgtggctgtgtgcgcctataatctcagctacttgggaggctgaggcaggagaatcacttgagcccgggaggcagaagttacagtgagccgagatcacgccactgcactccagcctgggagacagaggaagactccgtctcaaaaaaaaaaaaaaaaaattacattcaacgagttgttgctggcaattcaacatgcactgagatttatttctttatagagtttgcattgtagaaactgaaaatattgcatatgcaccaaatacataaaacagttcacaatgaaccaaaatactgatggagccagtattgtaaattataatttccttatgtttcttcatagtttcacaacctgtatgtgtgtatatatgtgtatgtgtctctgtgtgtgtgtgtgtgtatatatatatatatattttttaattttttgtatttttagtagagacagggtttcaccgtgttagccaggatggtctcgatctcttgacctcatgatccgcccgcctcagcctcccaaagtgctgggattacaggcgtgagccactgcacccggccttatttttttattttttaaaaagtactttatggatgggggttatcactattttgctcagggttttctggaattcctagtctgaagcaatcctcttgccttgtctttccaaaatagttagattacaggcatgatacaccatgcctggccactaatttctttttttttttttttttttttttttttgagacggagtctcgctctgtcacccaggctggagtgcagtggcacgatctcggctcactgcaagctccacctcctggattcacgccattctcctgcctcagcctcccgagtagctgggactactggcacccaccaccactcctggctaatttttttttttgtatttttagtagagacgggggtttcatcgtgttagccaggatggtcttgatccgcccgccttggcctcccaaagtgttgggattacatgggtgaggtaccgcacctggccacctggccactaatttctttttttttttctttttttttttttttttttttgatacggagtctcctctgtcacccaggctggagtgcagtggcgggatctcggctcactgcaagctccgccttctgggttcacgccattctcctgcctcagcctcccgagtagctgggactacaggcgcccgccactgcgcccagctagttttttgtatttttagtagagacggggtttcaccgtggtctcgatatcctgacctcatgatccgcctgcctcggccacccaaagtgctgggattacaggcgtgagccaccgcgcccggccttcttttttttgtttttttttttgagacggagtttcactcttgttgcccaggctggagtgcaatggcacgatctcggctccctgcaacctctgcctcccaggttcaggcgattctcctgcctcagcctgagtgtctgggattacaggcgcacaccaccacacctggctaattttgtatttttagtagagacggggttttgccatgttggtcaggctggtcttgaactcctgacctcaggtgatccacctacctcagcttcccaaaatgctgggattacaggtgtgagccaccgcacccggccactaatttcttttttttttttttttttttctttgagacggagtctcactctttttgcccaggctggagtgcaatggtgcaatctcagctcactgcaacttccgcctcctgggttcaagcgattctcctgtctcagcctctcaagtagctgggattaaaggcgtccaccaccacgctcggctaattttttgtatttttagtaaagatgaggattgtggccaggctggttccgaactcctgacctcaaatgatccacccgccttggcctcccaaaatgcgaggatttcaggtgtgagccactgtatctggccactaatttctttttatcactgaataatttattgaaaagttcatcttgagctgggcttggtgccttatgcctgaattgccagctatatgggaagctgaggtaggaggattgcttgaggccagaagttggagatcagcctggtagatacagtgagatcccccatgtcttggggaaaaaaaaatttgctcatcttgtctgactttagtttttgggaaatatggataaggctgctgaaaacgtctttgtgaggacttttctggggacatgagctttcaattcattggggtcaatatgtagtagggttactgatgaatcatgtggtaagaccatgcttatcttcagagctcaccagactgtcttacagagtgactgtagaatattccattcacatcaacagtgaatgggagttcctgtggcttcccttttttttttttttttttgagatggggtctcgctctgttgcccaggctagagtgcagtggtgcgatcttggctcactgcaacctccaccttctgggttcaagcattctcctgctcaacctcccaagtagctggaattacaggcactcgcccagctaatttttgtatttttagtagagatgagtttcaccatgttaggcaggctggtctcaaactcctgacctcaggtgatccacctgcctcagcctcctaaagtgctgggattacaggcgtgagtcactgtacccagcctgcctatctttaatcaactagtttatttcatacaataatcaatcattattataaaaaacataaaatttaccagcttaaacagtttgatgtatacagttgaattagcttgagaactctacataacatctaatatgaattatacttattttttttttggctactggctttttacaattatagcatcctgtctgaggtttcatgcatgttgcagcaggggccaggatgttattttccaagactgaacaatatcctgttgtatttatatgcttaccatatttaggttatccatttagcctctcagtgggtatgtgcattggtccacctcttagctattgtgaaaaatgcttttcaaatatgtcttcaagatcaggctttacatggcaacagcagactctggggattacttgagataggagaaagggagaagggcaagtgttgaaatactactgggtactatgctgtgtacctgggtaacaggatcatttgtactgcagagctcgaaatctgaaagtgctggaattacaggcatgagccaccatgcccagccctgttctttggtttttaaaattcaagtagacgttgggcacagcagctggctatagtgttagcttcttgaaaggctgaagtggaaaaatcgccgtagcccagggattggaggatttagtgcaccatgatctcacctgtgaatagctactgcactccaacctgggttacatagcaagactctgtctctaaaaaaaggaaaaaaaaagccaggcgcagtggctcatgcctgcaatcccagcactttgggaggccaaggcaggtggatcacctgaggtcaggagtttgagaccagcctggccaacattgtgaaaccccatctctactaaaagtacaaaaaattaggtgggtgtggtggcaggtgcctgtaatcccagctactcggaaggctgaggcaggagaatcacttgaacttgagaggcaggggttgtggtgagccaagatcgcgccattgcaccccagcctaagccacaagagcgagactccttctcaaaaaaaaaaaaaagattctaattgtttcttttacattactgatttgaactaatgaaaaaaaagtttaaagtttgttaaacaataaaagtgaatttgatttagaattctgactgaggactataggcaaatatccataacctgggagcagttccgtctcactgctcctatgcagtattttggttcagctcatgtatagatggtgaggattcattatgtgaaaaatcacatctaagtttgggtgcaagagtacatctggccatagttcagagaggcataatcactaaccccatcagatattatcttatgtgttacaaaattagctaatttctcagaccaaaccccactttgaatgattgccctcattactcatttgggtcctggaggtccacattcttttgtttttttttttttttttttttttgagacggagtctcgctctgttgcccaggctggagtgcagtggcacgatctcagctcactgcaagctccgcctccaaggttcacgccattctcctgcctcagcctcccaagtagctgggactacaggcgcccgccaccacgcccagctaatttttttatttttagtagagacgaggtttcaccgtgtcagccaggagggtctcgatctcctgacctcgtgatccgcccacctcggcctcccaaagcgctgggattacaggcgtgggccaccgcgcctggtggaggtccacattctttacctaccctgccgtgtggccccggaagctgacttccaagtaccacagcagtcaggttcccatagcctctggctttcggttggcccagttcatgggaggtgctgccaggaaagcaggtaataggagagaaaatcaggatctctagtccattggctgccaccctgctgtcctgagaggttggcagtcatcctttcctctgctcctgctgaatggccctctactaaagctcagggtgttcctggggtctcataacagctctgtcttgtctctgcctcaggcctagtgatgtgctttgctccctgctgttggtggactgctcctcttgtgggtatatcacaggctccctgtaatgctattggttctgtattttaaataataatttctctcacttaactacacttttgagtgttacactcttccttcctgatctatgtccaaaacagaagtctcaataacatgcaaagatgcagtgtgttaagcaaaagtggaagataacgagaccatttcaggtagattcatatgctgcagtcctacaatggtgtatggttaacataggaaaatgaggccattggggtgacttagctcaggttgtgctaatgaaatgccatgggctgagcttctcaaacagcgacattattttttattttttaaacatttctccagcatgagatatctaaaatctagctgccaggcaatatgattcctggtaaagaccaagttcctggctgggatatagacaccttcttgctataccctcatatggaagaaagagtgagtgttttctccctctctcttcccgcccgccttggctttccaaagtgttgggattacaggtgtgaggcactgtgcccagccttcgttggaagtcactaatgccaccattagagtccaaccttgtgaccttatgtaacccgaattatttccttaagtgctcatcttcaaatgacatcatgttggggtatagagattcaaagtatgaatttggtgggtgactaaattcaatacacagcaagggtacaagaaagaagttcataaaaggggctttggacccatgcatgcagatctgactgtacagattgccagatggtgagcatgttcaatggagagaggtcacagatagctatatattagcatgtaggggccaggggcagtggcttatgcctgtaatcctagcactttgggaggccaaggtgagcagatcacttaaggtcaggagtttgataccagcctggccaatatggagaaaccccatctctcctaaaaataccaaaaattagccaggcgtggtggcacatgcctgtagtcccagctactcaggaggttgagacatgagaatcgcctgaacccggggtgggagaggttgcagtaagccgagattgtaccactgcattccagcctgggcgacagagtgacactctgtctcaaaaaaaaaaaaaaaaatacacacacacacacacaaaacagactgggcacggtggctaacaccagaagtcccagcactttgggaggcgcagtcaagcggatcacctgaggtcaggagttggagaccagcctggctaacatggtgaatgaaaccctgtctctactaaaaatacaaaacaattagtcaggcatggtggcactcacctgtaatcccagctacttgggaagctgagacaggaaaatcaattgaatctgggaggcggaggttgcagtgagccgagatcacgccattgcactccagcctgggcgacaagagcaaaactccctctaaaaaaaaccacaaaaacaaaaacttatgctgggacaaaagtcatgatcaaggactgttcttgggaaaccagaatatatggttagataatttttttctttttttctttttttgagacagtctcgttctgtcacccaggctggagtgcagtggtgcgatcctggctcactgcttacctccgcctcccaggttcaagcgattctcctgcctcagcttcctcagtagctgagactacgggtttgtgcctggctaatttttgtatttttagtagagacagtgttttgccatgttggccaggctgctctcaaactcctgacctctggtgattgcctacctcggcctcccgaagtgctgggattacaggtgtgagccactgcacccagcctggtcagataacttctgagacagttttgtacttttatgagggtaggtaatgtgggaaatgcattagagcagcagtccccaacctttttggcaccagggaccagtttcgtgggagaaaagtttttcacagaggagggtggggagatggtttttggatgaaactgtttcacctcagctcatcagggattagtttctcataaggagcatgcaacctagatctctcacatgtgcagttcacaatagggttatcaacccaagaaaatctaataccactgctgctctgacaggaggcagagcttaggcagtaacgctcactcgcttctgcttacctcccgctgtgtggcctagttcctaacaggccatggacaggtacccgtctgtacccgagagttggggacacgtgaattagaggacactcaggtggtgttcagtggagaatggatggcttgtttgctgtgtgagaaaatcttccacatatttggtcatagagatattgcattgtgtgaatgcacaggaaaaacattttgagtttttccactcttagatccctgtgcaattttgagaaatccagtcacaacagtgtgtggatgttaatgccgcccttaccacaagagggagcttcattgacgttgcctttctggaaaatggttcaaaggactttgttggaaattctactctactctactctactgtatttatgttatgttatgttgttatgttatgttatgttatgttatgttatgttatgttatgttatgttatgttattttagagacaaggtcttgctctgttgcccaggctggagtgcagtgttgcagtctcagctcactgcaacctctgcctcccaggttcaagtgattctcctgcttcagcctcccgagtagctgggattacaggtggccaccaccccagccggctaatttttgtacttttagtagagacagggtttcactatgttggccaggctggtctagaactcctgacctcaagtgatccgcccgccttggcctcccaaagtgctgggattataggcataagccgccgtgcctggcccctgaaatactttttaatatagggtgtaagccaggcgcggtggctcacatctgtaatacaaatacaaatacaaaaattaaccaggtgtggtagtgcgtgcctgtaatcccagctactcgggaggctgaggcaggagaattgcttgaacccagcaggtgaaggttgcagtgagctgagatcgcaccactgcactcaagcctggcgacagagcgagactctgtctcaaaaaaaaaaaaagtgtgtaacagttggtgaaaaggttcaaaaaaaaaaagaaaagaaaagaaaggtgacacttaaatttacatgacttttttttttttttttttgagacagcgtcttgctctgtcacccaggctggagtgcagtggcacaatcttggctcaatgcaagctctgcctcccaggttcatgccattctcctgcctcagcctcctgagtagctgggactacgggcgcccgccaccacgcccggctaattttttgtatttttagtagagacagggtttcaccatgttagccaggatggtctcgatctcctgacctcgtgatctgtctaccttggcctcccaaagtgctgggataacaggcgtgagccaccgcacccagcctacatgacttaactttttaccttgttaaacagagagcaatcaaccctgtgaacgttatgttccagattctgacaagtgtgttgaaaaaattctacacactaaatgaaataggagtaatgggtgagagagtgtgaccttgagtttcaagttggggtaaggggggcggaaaagaagacagtgtcttgaggtggtgacatctgtagtgagatctgaaatgacgtgttagtatatgaagtcaggaaagaggattctgggaagatggcagaataggaagtatcaagcagaaactacaggaagccatttttgtgaactgagttcctctgctgggccctcagaaaccagacctaccccagcgattaggaaattacacctaggcaatcgtcattgccccacacgctacaaagaacgttcagtagacaatggcttgagaaatgcgcccagtccaatctttgggtaagccaggtgcagagatgtacaaaaagactgtccttggcaaagttctatggtcacatgatgtttgaggcagttctgcatatcatatgagggccttattggagttcttgtgtatctctgccaagagagtactgcacagcagaggtcattattgcaacttccgtgccatttatttattttgagacagagtcttgctcttttgccaggctgaagtgcagtggcacgatctcagctcactgcagtctctgcctcccgggttcaagggattcctctgcctcagcctcctgagtagctgggactataggagcccgccaccacgcccggctaattttttgtattttagtagagacaggtttcaccatgttggccagaatggtctcaatctcctgacttcatgatccgcccgcctcggcctcccaaagtgccgggattacaggcatgagccactgcacccagccacttctgtgccatttaattgttcaccagttgccacaggtctatctgtgtacacctgagttgcttgagtggttctaaacaaatgaatttaactttcattgtggtgttgaatttttgtatataccttttatgaattattttgaccgtgggctgaccaatatcatgagtaaaagatttaaaaggtctagaggagccaggcatgttggctcatgcctataatcccagcactttgggaggccgaggcagatggatcgcttgaggccaggagtttagagaccagtctggccaacatggtgaaactccaattctacaaaaaacacaaaaattaactgggcatggtggtgttcgcctgtagtgccagctacttgggaggttgtgacgagacttgcttgaacctgggaagcagaggttgcagtgagctgagatcgtgccactgcaattcagcctaggcaacagagcgacactctgtctcaaaaaaaaaaaaaaaaaagccataggtaggaagcaaaatgtaaataatgagaaaaatatatatcttaagttcacatttgaaatatgtaagaaaatttggtgatgctgcaaataaactgaggattgtaattatataaattacaagtttttcctgagaaaaaacacattttcaacctaagtacattgatcttaaaggatttttcctttgctttttgaccttgctttgtgaaaaagtgcaaaaataagacatgaatagtcaaaataagaatttttgggccaggcgtggtggctcacacttataatcccagcactttgggaggccgaggtgggcggatcacgaggccaggagatcgagaccatcctggctaacatggtgaaaccctgtctctactaaaaaaaaaaatacaaaaaaatagccaggcgtggtggcgggcacctgtagtcccagctactcgggaagctgaggcaggagaatggcgtgaaccagggaggcggaggcttgcagtgagccgagatcgcgccactgccctccagcctgggcaacagagcaagactccatctcaaaaaaaaaaaaaggaatttttggccaggcatggtggctcacacctgtaatcctggcactttgggaggccgaggcaggtggatcacatgaggtcaggagtttgagaccagcctggccaacatggtgaaaccctgtctactaaaaatacaaaaaaatagccaggcatggtggcaggtgcctgtaattccagctacttgggaggctgaggcaggagaatcacttgaccccaggaggcagaggttgcggtgagccaagattgcaccactgtcctccagactctgtctccaaaaaaaaaaaattcatatctcacaaatcaaggtattttccatatgtcatcacacatagttaaggtttggtcagtcagtgattgcttctatgtctgctgggactgggatttttactctagggagactgaaataagcttttgtgaagagaagcacccatgacaccttaaaggaaatgatcggattgttccatgcatgacttttccacgatgtcattagcttcataatattagcataagagggttcctgacaagtttgcatcaacagcatgttaccagagaaagaaagacttgattggaatagtgatgctgactttgttctttactgggcaggaaattcagttttcaaaaacatattggccccataggactcaaggtgatttttttaaaaaagtagtagccaattgtggtggctcatgtctgtaatcccagaacttggggagatggagacagaagaatcacatgatccagcagtcaatgaccagcctgggaaacagggagactccatctctacaaaaaataaataaataaaatcatagtatataccttgataagaagtgaatttatagattttaactgaggtatgttatggttaacaatgtccataaattgtagggaatatatcagggtttagagaatagtatggtaaaaactggtccagaagtctgatggctggcctcccctcgccagaaggccgagtcttttgcccctgaacaggcacatgtcatacacctgcaatgtgagatgatgctcttcagtgaccatgatggatcaatacaaaaataactaattcttggcagggcacagtggctcatgcctgtaatcccagcactttgggaggccgaggcgggtggatcacgaagtcaggagatcgagaccatggtgaaaccctgtctctactaaaaatacaaaaaattagccaggcgcggtggcgggcacctgtagtcccagttacttgggaggttgaggcaggagaatggcgtgaaccaggaagcggagcttgcaatgagccgagatcgagtcactgcactccagcctgggcgacagagcaagactccgtctcaaaaaaaaaaaaattaaaataaaaaaaaacctcattctttaaccatgtcttgaaatgtgacagaagaaaacactttaaattgcaaacataccccaaatttttctcttctcacgaaatgtgactatcttttaatatctcacacatctcacagtcatctatggcttttggtcatattcattaccacagtatattattacaccctctttgacgacacttatgccactggtggtctttggtcagaagtcactcataagaacatgagatcacctttggtatttagaatagatgaaaattcatgatccagataaaaactaagaatataagcatgaaaagtaaaatctacatgaggaaaaatatgcctgacatccacatggcaacactgactcacagtgaccaccggataacatggtaacattatcaacttgatctaatacatgatgttaatgggaggttgtaatgtagcttcttcattaaaaaataataattgttagtatgcagttgttataaacagttaataagcttatttctaaaatacatgaacagaagtatttgttgccaagaaaccgcattagtgtttttagtcaggtatactcatacaaagttaaaaacgaagtgagacattacattcagttgtgaataacagcaaatgcttgaaatttcctgataagagcaaggtggctcttctcacataaaagcccttggtgagaccaatcactgcacaatgcagcagaggaacaagctcccatctagttggtttaatcaagaacaggctcgctaatccgtagaaacaacaatgcttgcaatacaaagtagacctcttaaaccaactcaatctatagaagagttgggcatcagtgagtatttccagccataacaacatttattagttctctggtaaacattttaacatttctgaagaaacagcaaagtgggcatgtatctttaatgtggagcactggggacatatctggagacctacaactctgaggaacagagacaagtgatttgggggatattctcgattaacaagccaaagaatcaggaaaatgggctggaagcgggtagccacacacctctctccctgtgtggggcctctaatatgtgactgatgccttccttttctgtgcctttgaaatctcatgcaagattggctataggtgaattgtattacgaaaccatccaagttcttctagattttattgtcctatcgcaagtctctcttctcaattcaaaaagcagttatccagaggttctttcaccactctcttttcttgtgtttcaaaggaagtgggacaacagaaagcttctcccgttgcttccactaaaaggatttctcatctattaatggtatgagttctttcatgttctcgacatgaactggcacgaataaaggctttgccacattgcttgcattgatagggtttctctccagtgtgagtcctttcatgatatcgaatgtaattggaaataaaggccttaccacagtgcttacattcatagggtttctctccagtgtgagtcctttcatgatatcgaatggaactggaacaagtgaaggctttgccacataccttacactcatatggcttatctccagtgtgtgtcctttcatgtatatgcaaggaagagaaatacctgaatgcttttccacattgcttacattcatggggcttctctccagtgtgcgtcctttcatgtatacgcaaggaagaaaaatacttgaatacttttccacattccttacattcatggggtttctctccactgtgcgtcctttcatgaatttgaagttgtgaagcacatctaaagcctttcccacactgcttacatccatagggtttatcctcagtgtgtgtcttttcatgcctttgaaggtccgaggtacatctgaaggctttaccacattgcctacattcatagggtttctctccagtgtgagtccttccatgcttttgaaggtgtgagccacatctaaaggctttcccacactgcttacattcatagggtttctctccagtgtgagtcatcttatgatactgaatggaactgaaagaaatgaagactttcccacattgcttacactcatagggtttttctccagtgtgagaccttttatgtctacgaatttcactaggaaaactgaatgcattcccacattctttacattcatcggcattcactcctgtgtgagttctttcatgtactggaagggtagtggaacgagtaaaggccttaccacattgtttacacttatatggtttcacaccagtgtgaattcgttcatggataagacataaattgagaaaatagaaggctttcccacaaaacttacatttataaggtccatctccactgtgcattaccctgtgtctttgaatgcatgaatgggaaatgaaggtttctgtacattctttaccatcatagggtttctctttagtgcaagctttatcatgtgattgaaaggagtcaagataactgaaggctttcttacattccttatttctatatggattctctccatattcctgatactcagatgacttgtgtccagtgtcagctctgatatgcgtattaagagatgaatgacccgtgccaacttctccacacacactgctttcacatggtgttattccaggaagagttttcctgttcagcatgtcatctgcaatctggttgaagctttctccacagtgatgactttctttactttcacagagtttctctctcataagacttcagtgaaaaatgagaagcacattattaacggtttgattaaaagtgacttatagggccgggcacagtggctcactcctgtaatcccagcactttgggaggctgaggtgggcagatcacctgaggtcaggagtttgagaccatcctggccaacatggtgaaaccccgtctctactaaaaatgcaaaaattagctgggcgtggtggcaggtgcctgtaatcccagctactcgggagcctgagttgggagaatcgcctgaaccccagaggcagaggttgcagtgagctgagattgcgccattgtgctctagcctgggtgacaagggcgaaactctgtctcaaaaaaaaataaaaaaataaaaaagtgatctatattggctgggtatggtgggtcacgcctgtaatcccagcaccatgggaggttgaggcgggcagatggcttgaggccaggagtttgagatcagcctggccaacatggcgaaaccctgtctctactaaaaatacaaaaattggctaggtgtgacggcgtgcgcttgtaatcccaactacttgggatgctaaggcacgagaatacctcgaacccaagcagtggcagttgcagtgagctaaaaccacaccactccactcccgcctgggtgacacagcgagactcttgtctcaaaaaagaagaaaaaaacatgatttatatcattaacaactattgcacttgcattgttaacactgcccggcaaagtgtcagctttctgctctgtctgaatcatttgaatattaatggactatatgctctacaagatggtctgggtatatatatttttttaaaattagtatttctatggggctttgtaatcctattttcaagtaaactattttacaaatactaaacatgtgcgtctttttttttgagttggggtctcaactcaccctgttgtccaaattggagtgtagtggtaccaacatggctcactgcagcctcaaactcctggcctccagcaatcctttggtctgaaagccccaaaggactggcatttgggggtatgcgcaacagtgcccagcccagcgtatgttacatttaaacatatgtttttaggaaaactttctatgaatacataaatttgatactgggcttatttcttttgcttctttttaacattttctcactttttttttttttttgagacggagtctcgctctgtcacccaggctggagtgcagtggtgcgatctcggctcactgcaagctctgcctcccagattcaagcaattctcctgcctcagcctcccaagtagctgggactacaggcatgtgccaccacgcccagctaatttttttgtatttttagtagagacagggtttcaccatattggccgggctggtctcgaactcctgaccttgggattcacccacctcgacctcccaaagtgctgggattacaggcgtgagccactgtacccggcctattttctcacattttaagattttctagaggcattgccttgtcttgcgagagaaaattaccttagatttctcctgggatttttgtactcatcttcaatgttctgaactttccatgtttttcctaaaacacagacccggagaaaacacagatccagaattagtatgaatttatttaaaaatcattagattctgtattcatggtacatggtagccatgcctgatttattcatcaaagtattttttgtccatgttccaaatcaatgaacagcattgatgagctagaagcatttgttctctaattcactgggaagtaatattgtcattcttacctacagaggtcaggttcttgaaggtttcctgcatcacatccctgtagagattcttctgggaaggatccagcaaagcccactcctcctgggtgaagctgacagccacatcctcaaaggccactgaatcctgaaacatctcacatatataaaagaggacaggtaagactaacagccctggaggcctatactttattcctaagaagttctcatgatactgtggactccaaacatttatcccatgacttggtcatcacacctcttactttctgtctatactcacgtcctcccacaaaccaaccctttttttgttaagagagagggtctttggccagtcgcggtggctcacgcctgtaatcccagcactttgggaggctgaggcaggcagatcacttgaggtcaggagtttgagaccagcctggccaacatggagaaacccgtccctactaaaaatataaaaatcagccaggcgtggtggtgggtgcctgtagtcccagctactcgggaggctgaggtaggagaattacttgaacccaggaggtagaggttacagtgggccgagatcgcgtcactgcactccggcctgggcgacaaagcaatactccatctcaaaaaaataataataaaataaataggccaggcgcagtggctcatgcctataatcccagcactttgggaggccaaggtgggcggatcacctgaggtcgggagttcgaaaccagcctgaccaacatggagaaaccctgtctctattaaaaaaaaaaatacacaattagctgggcatgttggcacatgcctgtaatcccagctacttgggaggctgaggcaggagaatcacttgaacccgggaggcagagattgcggtgagctgagattgcaccattgcactccagcctgggcaacaagagtgaaactccgtctcgaaaaaataaaataaaataaaataaataaaatctatactaatcaagagaaaatggtattaacagatggaaagatagactaatggaaaacagcagattctgaaaatagtgaaaccacgacaaagcaggtatcaccagccaattatgcaagtggtcctcacttaccagaaggaacagggacagatggttacctacaggagaacaaacaatctttgaagcccatcatctccatatgaattaattctagagttgcctgttaccgtgacttcttatgttaccttaccatgcattttcattatgggtttcactttcttataacagaagaaacccgtactcaagccgtgtgtagtggctcatgcctgtaatcccagcactttgggaggccaaggcaggccaatcacttcaggtgaggagttcaagaccagtctggccaacatggtgaaactccctctctactaaaaaacacaaaaattagccgggtgtgtgcgtgcctgtaatcccagctactcgggaggctgaggcaggagaatcgcttgaactcgggaagcggcggttgcagtgagctgagagagcgccacttcactccagcctgggcgacagaaagagactgtctcagaaaaaaaaaaaaaaaagaagaagaagaaagctgcacttgacctcaacagtttccagttatccacctcctcccagttcctgcatgtgctcaacccacatatgtgacttacacagctgcctcctggtgacgacctcactgtggaaaagctagacagaccaacttgacttgccccactgacccttatacccacgtggatggcacagaccacctgttaatcacagcctgacttcacagaactagcacctgcttgctccaaatctatcagaaacaactccctaagagaaacctccttgggcattgccctggaccccaagaaaaactctggcccaaaagtccctgtctgtctttctccccacctgctggttgaatgtgcatcctggatgttccccccactctgtgttgccctgcaaggtgtgctgccctcatctgtctgggatgtgataatgcactgttatgtcatggctttatggctttgttgagatgactctgctgtggctcacttcacctacacctttcccttaatagcaacatccaactggctgaccagctatgtgtctccaaataatggaagctgggactgggggagaaaaactgagcatcccaaggggttggctatctagatgaagagtgtaccaggagtctcctcccatttgggaaattcagttgctcctttgggagatcccacaccctgcctcaggctatcctctgggaggactgacacaggggctgatattcagtaggccaggagagatgggagctgtgggcattttggttcagccccaggcggttctgaaacccaggaccaggaaaagatagattgggactcctgaagacacatcaccctgtaaagttttcaaaaaggaaacaggccaggcacggtggctcacgcctgtaaaattccagcactttgggaggctgaggcaggcagatcatttgagctcaggagttcgagaccagcctgaccaacatggtgaaaccccatctctacttaaaatacatggggtatggtggcgcatacctgtaaacccagctactcgggagactgagggcaggagaatcacctgaacctgggaggcggaggttgcagtgagccaagaccacgccacttcaattcagcctgggttacaaagagagactttctctcaaaaaaaaaaaaaaaaaaggaaacaacccaaagacattctgagatggtgtctgtgccttacgaagataagaggagaggaacagaggtttttcactggagtatcaagtggttattctctattctatgtgaaatgttcagaaacagaacacaaatattttaaaaaaagttatccatgaccttgtgaaaagatgataaaccactaaaatactgcatctatgtgaaagaaaggatgaagaaatatactctacaataaagaaagttgatacaggaggctgaggcaggagaatcacttgaacccgggaggcagaggttgcaatgagccaagatcatgccattgcattccagcctgggcaacaagagcgaaactccgtctcaaaaaaaaaagaaagttgataatactgtgagttggagaaggggagttaatgtttggagatgcggaaaagtaattgaaaatttaagatgttactgcaaactgctgaagagttagggcggggtagcagggtggaggatttgagacccatacattaggaaaatgcaggaggaagccagtccctatagacagtgtgaaaaaatttaaagcagcagcaattagactgaagtgtgtttagtgctataagaaactacctaaggacaccaaaatcaaactcaaattgaggcaggaaaatagggtctggacgcagggaacataaggcctattcaaacttcagctatgaaaggaaatacctactccatagggcgtaagccaagtaaatgattttataaccttacttcatcctctccttttacatagagtataccccaagtaaccaatggaatcctccagggggtatttaaactcccaaaaattctgtaacggggcctttgagcccctgtgctcagccccgcttgcacactgtggagtgttaaatcccttcattccttccttgctttgtgcgttttgtccaattctttgttcaagacgccaagaacctggaccccctccaccgttaacaaaatgcaattcttcttaaaactttctggtaccaaaaccacaaatcatgactgggcgtttctcactcatgaatcgctgtttgctcaaactctttaaatttttttttttttttgagatggaatctcgctctgtcccctaggttggagtgcagtggcgtgatctcggctcactgcaaccttcgtctcctggggtcatgcgattctcctgcttcagcctcctgagtagcggggactacaggcgcatgccaccatgcccggctaattttttgtatttttagtagagacggggtttcactgtgttagcctggatggtctcgatctcctgacttcgtgatccgcaagcctcggcctcccaaagtgctgggattacaagcatggtccaccgcgcccggcccaaactctttaacagaaaaaaaaatccgcaggattcccccatgaccctcccgtggtccccgcaaaatctgaagagacgcggggctgcaggcgcggagctgcccagagagggctccagggtcggggcccacagtcgcccgcgcaggaacagaacaggaggacgcccggggtcccggctgccggcccagccgcaccctgcggccgaggggacgcagggacgagctgagacagagggattcgggtcccagatccaggaggcgcggcgaggaggcccagatcccaccacagccgcttccggccggttccacccagcccctcccccgtctggggactccggccccatacactcaccatttcccggcttctgggtgtcccggtgtcctctctagggctcccgtgaatagtgcgggtcacggtgcaggcggcagagcgacagaagttgtggcagagggacccggggcctctcggagtaggaaatctggtatcccgacaacaacctgcatagcaacaaaagtagaagctggaatgggcctcctccttccggacggaccgttggccgggctccgccccggcgcttctgattggacaaggtacaaggccccgccccctcagaactgagtgacggcagaagccctgggtaacgagccctgcaaagccggactgatcggttctagccacagcttctctctaagggacaactccttccctgagccctggtcattggatattttcttttcagccaaatttgctcctgatttttacacagggcactatcttcttcctcattcaatgggctgtcagtgcttcttcgtcctgcacagggttgtaagtgtgtgcagggaattccagactgagtgtccaatggagcgatgtgctgacctcagagcaggaaggggagcccagatcaggccaggcacgactgcaccaagaaggagaggcagttgtccttcaggggcccggaattagggatgagacatggccaaggctttcacacatctcaccccacctcacagtgtggaaactctccctccttccagaccttcatcttcatcggcagaaaactctcacttggtgattttaagcttctgacctaaataaactgtcaactgcataagccccttctccaggagaggtcccaaacagttatttccctgaacttgatctttacggattttcttcagatatgcaaattacagtctgaccccagggactctatgcatgtcaaacccaaaacactgctcccgaaaaccgccccagattccagatgtacagccgcagaaaggacagaactcctgaagtgcacctgcacgtgggtctcctgctttccagggcgctgcagcatgtcagaacccacactctttctggatctgctctgagcagctgcaagccacctgcaggggagggcggctgcccaggaagcacccagaactccacttcactccttggcaggatccatactagcctcagcgtcccgtccctggcgtcggtctctgctgccccctgcaggttattcacctgcttctcacatcattcatcagtttccatgagacaaacatcctcaatcccactgcgagaataacacacgagcaaagctctcctccagtgtgtatgtataaagtcgaggaggaagtgtccaagattatttaactgcatgaaagtgaggcagtagtggctgggcgctgtggctcaagcctgtaatcccagcactttgggagggcgaggtggctggatcacctgagatcaggagttggagaccagcgtgaccaacatggtgaaatcccgtctctactaaaaatacaaaaattagccgggtgtggtagagcccacctgtaatcccagctactcgggagactgaggcagaagaatcgtttgtatcaaagaggctgaggttgcagagagccgagattgcaccactgcactacagcctgggcaatagagcgagactctgtctcaaaacaaaacaaaaaaacacacaaatgtttagtcatgttacttatttctggtttccagcctgactttataacattcctgactctgggactctccagctctccagaattatgctttgaagaaaaaacaagatagagcacagggcccacatgtctcttataaactgtgaaccaaaatattacatagcagccatctgtcagaactgcttccaggctattgtcctcagtcacaatcctaaatcaaactcactttctttaacaaatttaattttttttcttcagtccacatgagtaatctaaaagaaacacatagacagaagaatctctttattatcatctttctaccaagtcaacatcaagcattaaaaaaatgtaaaacaaagtgaaaaccatccttctctgattcatcgtagacccagaatctgccagtcaccaacacctatcttcattttctctattacggccaacttttatctaagagatatcataggggcatatttaatagagtttgtcattttgtgttttatgaattttagaggtttttttgttttgttttgttttgaacttttatttgcattttcttttggctgaatttgtttgtctcttaagtttatgtttcttctggggtatctttttcttccgtgcatcctccttttctgcttttggaacaaggtgtttcttttcactaagcatcatctggatgtggcaggggagtttgtggatgggttcatctgcccatgagttctgtaagtcaggtggtacattatgggtgccttttccctggatgtgctcaataaccagggaatctacatctatacccttaagttcagcataactctgcacttgtaagcaaatttcagtaccttttcggggccactgatggtgagtccagccccaatgtctgtcttgcgtacagcgaccaactccactttctaagactgaaatggtacacataatttctgtaaaagaaaatatttcagatacttggtggcttttcatataggcatacctgtgatggcctgagcaccttcacagtttacagtgaacatgagggtttcatccttctaacatgcacgacttcgtgggattttctgggtcatagtgaataatgttcatagatcaactcaggccacacaagaggacaggttttctttggtctttaaaaggaactgattaaagaaaaaaaaaaaaaaaaggtggaagccaggcacagcagctggtacctgtagtgacagctacttggcaggctgaggtagaaggattgtgagcccaggaatatgaagctctcatgcactaagatcacacttgtgaatatcactgcactccagccgggtccaaacagcaagaccaactctctaaaaaaaaattacataataaaataatttaaaaaaaagtttgtggttagaaaaaagtttttatttaagacattcattaaagaaaaaagtactttgagaagagattagggccaggcgtggtgcctataatcccagcactttgggagcccaaggtggcagatcatgaggtcaagagattgagaccatcctggccaacatggtgaaaccccatctctactaaaaatacaaaaattagctgggcgtggtggcgcatgcctgtagtcccagctactcaggaggctgaggcaggagaatctcttgaacctgggaggcggaggttgcagtgagccaagattgcaccactgcactccagcctggccacagaacaagactctgtctcaaaaaaaaaaaaagatattaggcctggcgcagtagctcacacctgtaagcccagcattttgggaggctgaggcaggtgggtcacttgaggtcaggagttcaagaccagcttggccaacatggagaaacccgtctctactaaaaatacaaaaatggccgggcgcagtggctaacgcctgtaatcccagcactttgggaggccaaggcaggtggatcacctgaggtcagaagttcgagaccagcctggtcaacatggtgaaaccctgtctctactaaaaatacaaaaattagctgggtgtgggggcacacgcctatagtcccagctactcaggaggctgagaaaggagaatcgcttgaacctgggagttggaggctgcagtgagccgacagcacaccactgcactccaacctggagcaagactctgtatcaaaaaaaaaaaaaaaaaaaatttgaaggctggaaaaagattagaaggccgggtgcagtggctcacacctgtaatcccagcactttgggagacactggtgtgggtcacttgaggtcaggagtttaagaccagtctgaccaacatggtgaaatcctgtctctactaaaaatataaaaaattagcctagcgtggtggtgggtgcccgtaatcccagctacccgggaagccaggaggtggaagttgcactgagccgagctcacaccaacacactccagcctgggcaacagagtgagactctgtctcaaaaaaaaaaaaaaaaaaaaaaaaaaaaaaaaaaaagagtttagaggctgggcatggtggctcatgcctgtaaagccagctactcgggagactgaggcagaagaatcgcttgaacccaggaggcagaggttgcagtgggctgagaatgtgcaactgcactccagcctgggagacagagcccgactctgtctcaaaaaaaaaaaaaaagaaaactcgtgagaacgaatggcataaaatacgtagtgtacccgatagccagccatttattataggatatttttgaataggaactttagccttttgttttgataaagctttctgaggcagtgagtctgacaatggcacttccgttatccctttagtgagtttcttaaaatgagggcttgccacttaggtattgggctttcaataggagggaaaagatttttctgaccttcctgtatatatatacctgccactttgctgggctaaccttattattattattattattttgagacggagtctcactctgtcacccaggctggagtgcagtggcgcaatcttagctcactgcaacctccacctcctgtattcaagcaattctcctgcctcagcctcctgagtagctgggactacaggcgccaccacacctggctaatttttgtattttttagtagagatggggtttcaccatattgaccaggctggtctcgaactactgacctcgtggtccgcctgcctcggcctcccaaagtgctgggattataggcatgagccactgcacccggccaaacctcgtattttttttatgacagaactgtcttaaggtcttactggaggtgtgtctctcttaagagttatttccaactctgtgtcctaggtatctgagtgaggccccagctaaactactcccaaaaatttttgctcctgggctactggcatttatttctgaatgctgtcaaatgacagtgactgcagaagcttcagaataattttgcgatggttcccatgatttgagggaaacacatttttaccatgattggattcggtggcttctaggaatcttatgtgaattaagcaatcttctcgccttggcctttcgaagtgttggagctacagggtttttctccagtgtgagtcctttcatggattttaacgctcgaggcacatccaaaggctttaccacattgtttacattcatagggtttctctccagtgtgagtccttccatgtgttcgaaggtgcgaggcagatctgaaggctttcccacattgcttacattcatagggcttctctccagtgtgagttctttcatgatatcgaacggaattgaaagaaacaaaggctttcccacactgtttacattcatacggcttctccccagtgtgagttattttatgtgcatggaggcatgtggaactatggaatgctttcccacactcactgcattcataaggcttctctccagtgtgagttctttcatgtattcgaaggctaccagaatgactaaaggctttaccacactgtttacattcatatggtttctctccagtgtgagttcgtttgtggataagatacaaactgagacacatcaaggctttcccacaaaagttacatttgtagggtccatctccactgtgcattatcctgtgtcttcgaatgcttgaacgggaaataaagctttttccacattcctcacaatcataaggtttccccccagtgtgagcccattcatgtgttcgaaagtaggggagatcactgaaggctttcttacagtatgtacatttatatggcttctgtccatattcctgatactcatatggcttgtgtccagtgtcagctctgtggtgcctattaagggatgcatgacccacgctgacttctccacatgattttactcggggagttttcttcttcagcatgtcatctggaacctgggtcaaaatttctccatgctgatgatctttcttactttctaagagtctctctcccataagacctctgtgaacaatgagaagtatatcataatgggttcctttatcactgatttgatattcattaacaagtcattgcacttgtatttctaacactgtacagcaatgtgtaggctttctgccctgtctgaacatgaacagaccacacatgctctacaagatggcccagctatacctgttatcaagaaagataatattgatatagggcttcttagtactttttaaacattttttgagatagggtctcactctgtcatccaggctggagtgcggtggtgagatctcagctcactgcaacctccatctcccgatctgaagccgtcctgccacttcagcctcctgattacctgaggctacaagcataccatcgtgcctggctaatttttgtatatttgctagagatggggttttgtcacatttccctggctggtctcaaactcctagactcaagcaatctgcccacctcagcctcttaaagcattaggattacaggcatacacctgggcgcccggccaacactattttcaggtaaactattttacaagtactaactgtctttgtcaattttattgcttctgagtcagggtcttgccctttaacccaggctagagtgtaatggtgctatcatggccgagtgtagcctcaaactcttcagctcaagcaatctctgacctgaacctcccaaagggctggattataggcttaagccaggatgttcagcctatgtcacacttaaatatatgtttttagagattttttttttttttgagacggagtctcgctcagtcgcccaggatggagtgcagtggcatgatctcggctcactgcaatctctgcctcccgggttcatgccattctcctgcctcagcctcccaagtagctgggactacaggtgcccgccatcacgcccggctaatttttttggatttttagtagagacagggtttcaccatgttagccaggatggtttcgatctcctgacctcgtgatccgcctgcctcagcctcccaaagtgctgggattacaggcgtgagccaccacagccggccctagagaaaattttgtaagaataaatacagtggaacttggcttatttcttgtttgcttctttttaacattttcttccattctatgattgtctagagagacatcactttctcttgtgaatgcgaattaccttaggtttctcctgggatttttgtactcatcttcaattttctgatctttccatttttttcctaaaatacagaaccagaaaaatagtcctgaattagcaaaattatgaaaaaagtactagattctaagttcatggtacactgcagccttgcagcatttattcacattcctattccctgtcctcactattccctgtccacactccaaatcactcaacactactgacaagctagaaacacttgttctctaattcactgaggaaagtaatattgttacccttacctacagaagccaggttcctgaaggtttcctgcatcacatctctgtagagattcttctgggaaggatccagcaaagcccactcctcctgggtgaagttcacatctacatcctcaaagaccactgaatcctgaaacatcccacatgtgtaaagaaacatgggtgagactgacagcactgggttcctatactctattcctacaaagtttccatggtgctatggactccaaacatttattccatgatctggtcatcagactttttactctgtcaacactcactcttccataaagaaattctttttttttaattattattattttttgagacagaatctcattctgtcacccaagtgggagtgcagtggcatgatcttggctcactgcaacctccgcctcccaggttcaaatgattctcatgcttcagcctcccaagtagctgagattataggcgcctgccaccacgcacaactaatttttgtatttttagtagagatggggttttaccatgttggccagactggtctccaactcctgaccacaagtgatccaccagccttggcctcccaaagtgctgggattacaggcatgagccaccaagcctggctgaggccctaccaatctgactgataagagtcataactaactaaaacaaaaaatcaagagcagaaacctttcttggaaactgtgcttgggtagaaaagcctgaattataactgatgaattgctggaggttgaatggcaacaagattggagaggcaaaaactccagggtgtccagtctcaacaaaaaggcaaatatttatcaaatgtaaaaacttttgtgtgaaatggtgtaagagaacaccatcaagagagaaaatgaaccccatgtgctctgtccaaaggatggtaaatggctcagcccctatggaatagtatgacggtgcctgaaaaaaataatataactaccattttttttttttttttgagatagagtctcactctgtcacacaggctggagtgcagtggcacaatcttggctcactgcaacctcagcctcccaggttcaagcaattttctgcctcagcctcccaagtagctgggattacaggcgcccgccaccatgcctggctaatttttgtattttttttagtagagacagggtttcaccgtcttggccaggctggttttgaactcctgaccttgtgatccacctgtctcggcctcccaaagtgttgggattacaggcatgagccactgcgcctggccaaaattaacatatctttcagcaatctacttttgtgtctacttattttcaattaaaaaaaaattgaaatccagatcttgaagacacatttgaaaaccactgttaacaatagccaactttgggaggccaaggcaggtggatcacgaggtcaggagatcaagaccattctggccaacatagtgaaaccccgtctcttctaaaaatacaaaaattagctggtgtggtggcggtggcgtatgcctgtaatcccagctactcaggaggctgaggcaggagaatcacttgaacaagggagtcggaggttgcagtgagctgagatctcaccactgcactccagcctggcgacagagcaagactcagtctcaaaaaaaaaaaaaaaaaaaaatcagtagccaagagctgcatcaatccacctgtccattcattgattgctgaatgaataacaaaaatgtgataggtatatatatatatatgcaatggaatattatttaatcttttaaaataacaacctgtccgttgttacaacaagcatgaaaatttaggatactatgctaacagccaaggtagtcaccaaaagaaaaatacagtatgattaaagttatgtagagttgtctaactaaatcaactgtacagttaaaattgcataagctggtaaaatttaagttttttactttataattattaaaattaataaaataccaagtaaaaacctaattgattaaaaggtgggcaaagtatttcagtgacgtttctcaaagatacatacaagtgacaagtaagcacgtgaaaaagggttcaacatcaggaatcattcggcagaagtatttttttttttttcagacggagtttcgctcttgttgcccaggctggagtgcaatggcgcgctcttggctcactgcaacctctgcctcccagcttcaagcaattctcctgcctcagcctcccgagtagatgggattacaggcatgcaccaacactgcgggctaattttgtattttcagtagagacagggtttctccatgttggtcaggctagtcttgaactgctgacatcaggtgatttgctcactgtgacctcccaaagtgctgggattacaggtgtgagccaccacgcccggcccgacctaagtattttacacaacaaagtttccggtggttattgagtgctttcctctcatgaaaagtattcataaacaaaatagaaaagtttccaatgcagccattcatggctctgtggaaaaatgaaaaacaaaatactacagctctttcaaatacatcatggtggacacactgatgaagatgtcgattagagaggggagatgggtgctttggaatgtgggaagggaatcagaaatgtaaggatttgttgttgtccccatgaaaaggtagctgtgggggtctcaaggactccctctttgacaaggctttgaccttgtcctacaaaacccagttatagcaaagatccttctaagggagttcagagaaaccccaccctggcccctccaaacgtgatacccaatgaagttctgttacccctattcataactcatcagctttctcttctgtaacccttgatacctcaccaagttccatcctctccctcaatttacccttgaactataggttcaatactgttgttgctgcatgcaaggttgaggtcaatctctctcccatattacagttctcatgacccacatcacaactgtcctgaataaagccttctttgacatttttaacacgatttcagtacaatctttttttacaagggacagggacttagacttgaaaccctgcttcacaagtctggaatgcataggggataatatgctctctccctgtgggaaggaaggagggtgtcctgagagtatctcccactcacatatccagaactctgggtcagacttctctcctcatgaccactccttgttgtcactccataaactgggtgagatgggggactgtggatacaccattacccagacagtgttctacggtggagctcgcctcctgcagtgatgggacacaatgcctgggagtcctgtttgccaattcagcccttaccttgtgtcataaaggagactgaggttccaactgagatggatatatgtgaggaccaggtgtagaattttcaagtttttcttccatttggtgaatactctttgcaatttatttcttctttttttttttaagcctatagcaagcagtattctcatgcattctataaaccatgcagtaaccaggcttgaatctgctcagctgctaagatcagctatactcttgtatttcttttttttttttttttcttttgtctgagacagagtctcactctgtcatccaggctggagtgcagtagtgcaatcacagctcactgcagactcaacctctggggtcaagcaatcctcccaccacagccttctgagtacctgggctcactggagcatgccaccacacctgggtaatttttttttttttttttttttgagacggagtctcgctctgtcgcccaggctggagtgcagtggcacgatctcggctcactgcaagctctgcctcctgggttaacgcctttctcctgcctcagcctcccgagtagctgggactacaggccccgccaccacgcccggctaattttttgtatttttagtagagacggggtttcaccgtgttagccaagatggtctcggtctcctgacctcgtgatccgcccgcctcggccgcccaaagtgctgggattatagatgtgagccaccgcgcctggccagttttttttattttttgtagagacatggtctcactatgcttcccaggttggtcttaaactcctaggctcaagagatccccttacctcagccttccaagttctgggattccagatgtgaaccactaaccttgaccatactcctgtatttcttcattgtgtctttcaaaacagaaaagcttaaattttaatgtagtcaaaattacatactttttctctgttcctagtgtttctcttgtcatattatagcctcttcttcctaaacctaagatcatgaatatttttgggtggcacattctgtagcaacaagagggtgaggttctcctttgttcccagaggagaatgagactggtgtattctgcaggctaataaggaaatgaaactcactatactatggaggataaaagtatataaatttacactataacagtataatgccatataggctaataccgtttatatgtggcacttatatatcatatacacgttacatgtaatatttaccaattacctaccataactaaaccatatactgtatataaatgcaacatatgtacatgtatatgtgtatatatatacacacacactatatcctgtactagataatgctagattctattaaaatactgtacatgaatatctcctttaaatttcaaaagaaaacacctcaccaatatattggaaaagagaatcctataacaatatcatacccgtgatgaagtggcattcaattcaggaaagcaatgctgctctcacctctgaaaatccattcatgcaatacaccataatagtataggatcaacagcaaacaacacaagaacatcataatagatgcagaaaaagcatatgacaaacctcaacatttcttcatgataaaaacactcggccgggtgcagtggctcacacctgtaatcccaccactttgggatgccaaggcgggaggatcacaaggtcaagagctcgagacaagcctggccagcacggtaaaacctcgtctctactaaaaatacaaaaaattagctgggcgtggtagcatgcgcctgtaatcccagctacccaggaggctgaggtaggagaatcgcttgaacccaggaggcagaggttgcagtgggccgagatcatgccattgcacatcccagcctggatgacggagcgagactccatcttaaaaaaaaaaacaacaacaactcaataaactaataatacaaagtaacttccttaacttactataaggtatatataaaaaatgcaaaactaccctcattcgtgatggtgaaggactaactgctttctcccaaagatgagacacagacaaggatgtctgctctcatgccttctactcagcttgagaaaggagatgctactaggccaaccaggtcagaaaacaaaagcctaggcgggacgcggtggctcacgcctgtaatcctagcactttgggaggccgaggtgggtggatcacgaggtcaggagttcaagaccaacctggccaagatgatgaaacccgtctctactaaaaatacaaaaattagccaggtgcggtggcaggagcctgtaatcccagctacttggaaggctgaggcagaaaaatcacttgaacttcgggggagaagttgcagtgagcctagaatgcgccactgcactctagcctgggcgacagagtgagactccatctcaaaaaaaaaaaaaaaaagaaaagccctccagatttatagtaaagacacatgcacggctgggtgcagtagttcatgcctgtaatccggcattttgggaagccaaggcgggtggatcacctgaggtcaggagttcaagactagcctggccaacataacaaaaccctgtctctactaaaaatacaaaaattgccgggtatggtggcgcaggtctgtaattccagctacttgggaggctgaggcaggagaatcgcttgaacctgggagggggaggtcgcagtgagctgagattgtgccagtgcactccagcctgggtgacagagggagtctctgtgtcaaaaaaaaaaaaaaatacatgcagtgattctggcaggcatatagactgtcactgcccataccggtgtacaaactgaggcagaaatacaaaaaggcaaaagacttatgttagttttatatttcttttttttttttttttttttgagacggagtcttgctctgtcccccaggctggagtgcagtggggtgatctcagctcactgcaagctctccctcccgggttcacgccattctcctgcctcagcctcccgagtagctgggactacaggcacctgccgccatgtccggctaattttttgtatttttagtagagacggggttttaccatgttagccaggatggtctcaatctcctgaccttgtgatccacccgcctcagcctcccaaagtgctgggattataggcgtgagccaccccgcccagcccttacctatattcttttgtaaaatattgaaaatgcctgaacagagccaggaagggcctcttttctcttgatcttcattatagattaactttcctcttacctttctcacacaaagacttcatggccatcacagtgtcttaagctggaatgtcaaatttgataatggctcactgcagcatcaaactcctggggtccagtgatcctcctgcctcagtgtcccttgtatcaggaactacaggtgggtgcaaccacacctgtctaatttttctatttttcttttctagacatgggtcttgtattaccaaggctggtctccaactcctggtctcaagcaatcatcctgcctcagcctcacaaagctgggattacaggtgtgggacactgcactaggtcaagagtttaacttttagctccggagttctaagcccatttccctagagtctgtattttcttgaatggcaattctcagattttcacttaaataatctccttataataggaatctgatcatttcaatcatttaaggtagaaaaatccaaacaaggcgactacatcactgtaaccaataaagtattttttgatttttattctaatgcaccatataaaagcctatccttcaacctgtaaactaaaaataaaaacctaagctccccatcccaccccaatcaagtcaactgagtggctctttaccaaggggaggccccccaaaaacctgaaagttcccagttacattagtaagggagatcagacactccatactcccttctggagtttagacacagcaactgacccacattcatattaaaatagacataagacctgcaaagaggccgggcacagtggctcagtcctgtaatcctagcactttgggaggcggagggaggcggaggcaggcggattatttgaggtcaggagtttgagaccagcttggccaacatggtgaaaccccatctctactaaaaatacagaaattagccgggtatggtggcgtgcacctgtaattccagctacttgggaggctgaggcaggagaattgcttgaacctaggaggcggaggttgccgtaagccgagattgcgccactgcactccagcctgggcgagagtgaggctccatctcaaaaaaaaaaaaaaacctgcaaagaaaccctttgtaccaataaatactaaattgcaaacaagacctaaggccatgcaaggcaagggtaaagtcacgccttagaattcataaaatctagtgaaacatatctgttttttggtggggatggaatcacgtggcaggtaacagactcccttcacttaaacattccttcctacccctttcaaattttagacacaacttcacactctcagccaactgccaactacagaatccctcaaccacctgtgccttctaagccccgcttctacgtgtcctgccctgtcagccttccatgccttgattgatcttttccctgcaattcctgtctcgctgaaatgaataaaaccaaactgccatcgaacctcctggggaccacttactcgaggctacatgcggttgtttcccttggtcacgttctctcatattcggcgtagaacatagttcaagttattttgcagagttttgctctttccgttatcaaactgcaagccatgactgggtgtttctcattcaggaaacatttctcattcatttttttcaaactcctattctgagaagcaaaactctttaatttttaagaggactcagtttagtttgttgctgttgtttttgttttgttttgtttgagacagggtctcgctcagtcgcccaggctggagtgcagtggcgcgatctcggctcactgcagtcccaatctcctccctcaagcgatcctcccacctcagccccccagtagctgggattacaggtgggcggcaccacgcccggctcattttttaaaaatttatttttaatagaaactagggtctcggtatgttgcctaggctggtctcgaatttctgggctgaagcaatccccccgcctcaacctgccaggcgtgacccactgcgcctggccttcaatttagtttttcaggaaaaaaggggggactggggaccccgcagcccaccgctcctcccacacgaaccacacacccgaggcaggattgcctccatgaccctcccgtggtctccgcacaatctggggagacgcgggactacgggcgcggagctccccagagagggctccggggccggggccagggccggggtcgcagtcgcagcgcagagacgggacaggacgcctggggtcccggctgccggcccaaccccaccctgcggccgaagggaccgagggccgagctacgccagggggactccgctctgcagacccgaagtcgctgcaggaaggcctgggtcctgctagagccggttcgagccggttcctcccggcccctcccccgtctcgggacccccggccccgcacactcaccatttcccggcttccaggtgtcctggcctcctctccacggatccctctaacagtccagtcacagtgcgggcgatggagcgacagaagctatggcggaggcacctggtccctctcggggccggaaaaccgagatcccgacctccctttggtgcaagacgcctgggagtcaggaaagcgggaatgcggcctccccttccccggatggacagttggcaggaccccgccccagcgcccctgattggatgaggctccagtccccgtcccatcggtcctgagtgacagcggaagccctgggtaacaaggcccggcagaaccgaaatgacctgttccaaccacagattatctaagcgagctccctccctgcgtcttgctctttgggtatttgcatttcagccaaatttgctccgaattgctagagggggtaccgttgtcttcctcactcaatgggctgtccctgctcctttgtcttgcacaggaaattccagactcagagtccagtggaggtgaaggaaattaaaatattttacgccaaaatatatttatttgacagattttgaaatggctgtggctcggccgcaaaaaaaagtggactggcaaagctgtctttggagggggggaatttgcatctgcagagaatctccattgatgaaaccatgccctctccccctttatttctttccctttatccaagctagaagagattgtgacctgaacacaggcagggtgcggtggttcacgcctgtaatcctagcactttgggaggccaagactggaggatcccttaaagtaaagagttaaagaccaacttggtcaacacaagaatacccctgttttgttgttttttttttttaatttttatttattaaactttaagttctagggtacatgcgcacaatgtgcaggtttgttacatatgtatacatgcgccatgttggtgtgctgtacccattaactcgtcatttacattaggtatatctcctaatgttatccctcccacatccccccaccctagacccctgtttttattatttaaaaatctttacggccgggagcggtggctcacgcctataatcccagcactttgggaggccgacgcgggcggatcacgaggtcaggaaatcaagaccatcctggctaacacggagaagccccgtctctactaaaaatacaaaaaattagtcgggtgcggtggcgggcgcctatagtcccagctactcgggaggctgaggcaggagaatggcgtgaacccgggaggcggagcttgcagtgagccgagattgcgccactgcactccagcctgggcgacagggctagactgtctcaaaaaaaaaaaagaaagaaaaagaaaaagaaaatctgtgaaggtcagaattagagcaagacccatttgggatgcctcctggagaaagggtttatgaatttttatttattattttattttattgtatttattatcattttttttgagacggagtctcgctctgtcgtccgggctggagtgcagtggcgcaatctcggctcactgcaagctccgcctcccgcccgggttcatgccattctcctgcctcaacctcccaagtagctgggactacaggcgcctgccaccacgcccggctaattttttgtatttttagtagagacggggtttcaccgtgttagccaggattgtctcgatctcctgacctcgtgatccgtccgcctcggcttcccaaagtgctgggattacaggcgtgagccaccgcgccctgcgggtttatgaatttaacagtaaatttagcttaaactgactcaagtcgagagcttcctgttggtgaaaatgaaggtcttaaaggagagaataatttctaaactgaggaggggacagaagggcatttcaaactcccagataaatccttaattttctctgcctcatcatctgggactgacccgccctggggggctccatttcagcagtcacagtttggcttccaagcttggaaatatcatttaccttctgacagagggttttccttgtgaactgtgcatgaagcaggctgcttatctgaactacttcaaatgtttgctttacttttcttttgattcctttataaaatattgctgccggctgggcgcggtggctcacgcctgtaatcccagcactttgggaggccgaggcgggcggatcacgaagtcaggagttcgagaccagcctgaccaacatggtgaaaccccgtctctactaaaaatacaaaaattagccgggcgtggtggcacacgcctgtaatcccagctactcaggaggccgaggcaggagaatcgcttgaacccgggagatggaggttgcagtgaactgagattgtgccactgaactccagctgggcgacagagcgagactccgtttcaaaaaaaaaaaaacatatatatatatatatatatatatatatatatatatatatacacacacacacttatatatgtgtttgtatatatacacatatatgtgtatatatacaaacacatatataagtatatatatacacatatatgtatatatatgtgtatatatatagctgccatataattccagcttttccatgcacttagttttattctgttgttggcttgttgttttcttgagtgaaaatgagtagactgagagataaagtatgaaaaatctttggctatccctcatcccaaatttataatctctgacgacatcaggcctctctcctcttccagtgttggcctgactagacctcaaggcagacaacctccccacctcaaaccccctccccccacccccacctcccctgaaagaagggcccactgagtacaggaagacaacagtgtcagctctggaaagcctgaaacatattctgaaataccagtatccccagggtgggggccaggctgcagtgcaaggaggaaatccggctgtggctagaatctatatttttcttttcttttcttttcttttttttttttttcgagacagggtgttactctgtcacctaggctggagtgcagtgcgctgatcatagctaactgcagcctctaccttcaaggttcaagcaatcctctttactcagcctgctaagtagctgggactatagttgcagggccaccaggctgggctaattttttttttttttcttttttttttagagatgaggtctcactacgttgctcaagctggtcttgaactcctggcctcaagcagttctcctttccagccctccccgagtcctgggattgtataggtgtgagccacatgtcgggcctagaacctttcattcaagctccactcagccaggtgttaaattctcctctcactccgcctcccagaaggcggggcccgtggcactgtccaatcaggaggggcgggggggtgtggctgtgcaaattgtccaatcaggcgcggctctgggaggaggccgcgaagctccataaaactgcgaggcgttcctttcacccgcccacagtgggtgtcaggtctatgctgctctgagaagcaccagaggtggcttcgctgcagcttctttccagctgtgacttgcaatgaacacgaaagacataaggagaaccatagacacctcagaagccaggaaatggtgagtgctggggggatgtcccgagactgtggagcaaggtgctggacaggaacctgctgtgacgggacccaggcctgtccggggcgacttcgggaccggtggactggagtccccctagcgcagccaccgcgcccgatttaagagagaattttcaatggctaaactgcacatgtacatctcctgacacagagcacctggtgacaaccatcaactgtgaaggtcagggagctgctgaagcagaagagagtccatatttcattagtttttttttttttttttggagacggagtctcgctctgtcgcccaggctggagtgcagtggcgcgatctcaactcactgcaacctctgcctctggggttcaagcaattctcctgtctcagcctcccgagtagctgggactacaggcgcacactgccacgcccagctaattttttgtattttagtagagacagagtttcaccgtgttgctcttgttgcccaggctggagtgcaatggtgtgatctcagctcacggcaacttccgcctcccaggttcaagcgattctcctgcctcagcctcctgagtagctgggattacaggcacgcgccaccacgcctggctaattttgtacttttagagacgaggtttctccatgttggtcaggctggtctcgaactcctaaccttaggtgatccgcccgcctcgccctcccaaagtgctgagattacaggcgtgagccaccgcgcccgaccttcattagtggttttatataacagtttgttaatgtcgaaataatagtttgctggcttcttcattttatcaaaggaataattatttgccagttttaaaatccacttaaaactgtcttgaaatttttctcttctactttacggtaaacacaggaggaaagcagggactctgctggattctctttcgaacactgggattgagggtgtttgcctcgtggaactgaacaatgtgggtgaaaagcaggtggaaaacttgcagggggcagcatagcctgaggccggtgatccacactgagactaatctggagcctgcaaagggagggaaagggagctcccccgattgcttcctgggcagcctgccttcccctgtaggtagtctccagctgctccgaacagctccagctccagctccaggagtgtggattctgagaagctgcagagccctggaaagcaggaacttcacaggcaaatgcacgtgcgggtttctctcctttctgaggttgtacctctagtttcccaaggtagttttccggaaaactttttgttttttgagacggagtcttgctctgtcacccaggctggagtgcagtggcgcgatctcggctcactggaacctctacctcccgggttcaagcgattcttgtgcctcagcctccccagaagctgggattataggcgcccggctaatttttgtaattttagtagagacggggtttcgccatcttggccaggctggttttgaactcctgacctcaagtgatccgcccgcctcggcctctcaaagtgttggggattacaggcatgaaccactgtgcccggccttgatttttctatgtatagagttgctgcagtcaggctgtaatttgtatatatgaagaaaatatgtaaagatcatatttagagactcatttaggtagcgttccagagaaatggtttatgagctagagaggttggaatttcaaggggcctaaattgaccacaggtgagagttttctgctggtgtaaattattaaggtattgaaggagggagcgttcccacattgtgatgctgtgacaggagggcatgttgagctcccagagttaaatccttaggtttcctgcctcatcatcagggtctaatgtactctgtggctccacttcagcagtcactgactcttaagcttgggaatatgttctaccttctgaattcatcttttcctttttaaatgttctgaagtgccctgcttatctgagctagttcaaattttcgctttacttcccttttgatttctttacagattacggaaatagaacttgtttttccatgtatttaataattttattcacttgttggcagttttttattttcttgggtgaaaatgagtagattgatttgggaggcgaaagtgggaggttcacttgaggctaggagttcaagaccagcctggacaacaaacgaaatcccgtctctacaaaaaattaaagaatttgccgggcttggtggcatgtacctgtagtctctactactcaggggactgaagcggaaggttcgcttgaacccaggagatggaggctgcagtgagctatgatcatgccattgcactctaacctgggtggcagagctagaccctgtctcaaataaataaataaagtaataaataagtaaataaagtaataaataagtaaataaagtaaaaaatagagagagataaagaggtatggtatgagaaagccttgggcacgcttcccatatcctcatcccaaatttccgatccctgggaatatcacgccctttcttctgttccagtcctgcctggaactccctgcgcacacctgtgactcctcatgcaagaggtagatgaagaaatgacccactgagtacaggaagtatctcctttggtaaacccggattaagttctgctaaaatgcaagtatctcccatctccccatcccccgcagaccaagtacagtgaaggggacgaggggaagaagtccaccctgcgtttgagggctggggccaagacccctcattcccgcttcactcatctatgcttcacatctcctgtcattcacatctgtcaagatgcagggggcagagcccgaagctgtacccaatcaggggcaccggggaggagctctgcgatcggtccaatcaggcgcgccgtcggggacgcagctgcagacgttcaaccttctcgcgggattttcatttctcgcgtctgccgtacttggtttcgcttcgctagtcccagaggcccagagtggctcgcctggagtctctgtggcgcggtttcctgtacctgccttgggatccggagggaggaagctgggacacccgggagtcaggaaatggtgagtgtgtcgggccctgcgtcccgagacagggaggaggggctggttggacgaccggaactggctgtggcgcggcccgggccttcccgtgggcgactctgggtctgcgtaccgagtccctctggcgcagctcagcccttggtaccctcggcctcagggtggggctgggccggcagccgggaccccgggcgtcctcgtcccgccctgtgccgcgattgcggccccggccccgaagacccaagtctcttcagattgtgcggggcccacgcgagggtcatggggtgggggaaatcctgacttgtgcgtggaaggagctgtggtgtatgaggttcccagttccttttctctccacagaggacacccgtttttccctgagttttctaagtgtatgggatgcagggtcccaaatcctcactctgtcccccagcctgctgtttccagggcttgcagtaaatccccaaatttcctgttctcttttcgcttttccaaacgccaacctctccccttccattcacgacattagcaaccgtttctcctatattctacatttcagatattgtgctttcattgtttatttttcaacaaagcaatggattactctttcatcaaggtttgttttctgttcatagccttgacactccgctgtaagaaacctttgtgcttgtccttttgtctcctctatgcacagatacctcatcagaatgtctttgagttgaggttcccctttggaatctttacagggtgatatgccttcagcgccccctcctatttattttttcctggttctgggtttcaaaactgtctggggctgactcaagctgcccacagctgccaagtctcttggaggatctagtgaatattgggtcttgggtgagtcttcctagaggacagttgaaatagaaggctgggagaatgccctgggactaggataaatctagcataccctgcttctaaatagccaacctctgggggcactcagcttttcctcccccaaccccagtttccatcctttggagacacactggtggtcagccaatcagatgctggtattgaggattgagaaaagaaaattttttgtgtgttttgaaagagtctcgctctgtcgcctaggctggagtgcagtgacgtgatctcggctcactgcaacctccatcttctgggttcaagcgattctcctgcctcagcctcccctgtagttgggaccacagttttgcgccaccactcccagataactttttttttttttttttttttttgagacggagtctctctgtcgcccaagctggagtgcagtggcgtgatgtcggctcactgcaacctctgcctcccggattcaagcgattctcctgcctcagcctccccagtacctgggactacaggcgcatgccaccacgcccggctaattttttgtgtttttagtagagacggagtttcaccttgttagccaggatggtcttgatctcctgacctcgcgatccgcctgccttggcctcccagagtgctgggattacaggcgtaactgtacccggcctcaaaaaaataattttcgtctgataaatgtgggtccttttaaatgaacgggcacatagagacattcaagtgatacagcaatcaccttctaactccctgaagctatgaattcatcttttgaaactgctattgccacaagtaggtataatcaacttactaatgcaacacgggaccctggaacccacaccctatagcttaacagtgcatagccacgcgcttatcaatgttacttctgtaaatcagtgagaattcctgacaaacaactttgtatcagcccacatcctgtccccctttttcagacactttgggtcatattttgtgtttcagcctctactttttaggtcgacaagggaaaagacggaaatgattcctgtcctttgtattctctcagccttgtgaagggagaaaaactatctcagcgaggtggtggaataacctgaaaaacaaaatgcactttgggtacacagtgtcgcgtaatgcagtgtctcttgggcgggtggtcactgagcatttcagtgagcactatgggggtagagggatgttccaactgatagataagatgacctctgctgacactggagtcagacgaatgtctgtattccaggtcagcactgcttctccctgggattcttgccttaacaacaagttcagcttgagtatttcatttagttgaaagtgcattttatcagtagagcttcatagagaagataatgtatttcccaagaggtagatttcagggggaaagagattagtcttatattccacattttaaaaattcttattttcaacggcttgtatctgtatttctccatattttggagtaattatctgcatgatatgtgtaggtgctgtggctttttacctaagaagcagaatctcattccagtacatttgagagtcatgatgccaaatctttgatggtctgtgtcagagacacaaagtctacaatgtgtgtgttcacagtggtgtggattttatgcctcaagtcacttagaaaagtgtcttagaaaacctggacagtgcccttgtgtcttcacaataattcttttgtgtatttatggagatgattctgtaatcttttgggacatggaccaatgtgtatctcttcatactcatattctgcaccatctgtatgtagcacgtcagacttagcggtgtgaccttaaactttttaaaagaaactggaaggtcaataaaatttaaactgctggctgggtgcggtggctcacgcctgtaatcccagcactttgggaggctgaagcaggtggatcacctgaggtcaggagtctgagaccagcctggccaacctggtgaaaactcgtctctgctaaaaatacaaaaattagccaggtgtggtggtgggcgcctataatcccaggtactcaggaggctgaggcaggagaatcacttgaacccaggaagtggaagttgcagtgagttgagatcatgctattgtgctccagcctgggtgacagagcaagactccgtctcaaaaaaaaaaagaaaaaaaatttaaactgcttaacaacaaattcttattttcttttattctttcccagatcatgtgtagtatatgtgtagtatgtttgtcagatctgtgttctgttgggtgacttgaaatggaattccagggcttaaccttgagaatattatcagggaaaagaaatgggggtggggagaaccaactctcctattatggcttcagaaaaatgaatatagtttcccaagaaagttagtagataaattggggaattacaaagattcaccaaaacatcaatttctcttgcaaggtggagaatttgtgacggtgaataactgttctgtttcctgttattggaacttagcagattctaaatcttagggaacaggacctggcaacaactaggaatcctctaataggatttttgtttactaaatgatttgttatcatagaaatagtagttaagtgacatctttgtctgaaaatagtagattcttgtgctttttctgttcagctatgatgtaaatgtgccttaattttcttccctcccataaacattaagattgattttgctggattcatcaaacatgagtcattaaacatgggtattttctttaaatatccacatgaggtatgtaaagggaagtgggtagccttgactggggtgcagaggcctgaggccagcgactccaaactgaggccaatccaaaggagtactgcataaaggaaggcaccaatcaaatataagatctgcaaagatctgaaagtttaggcagaaaagtgttttctttcataggaaggggcaaacagattagaaagaagatgaggaggaagaaggcaggatggagggtgcaaaatcagacctagatcagaacatgttttattctgaggttattctgttcttaggaagtgttgcctatttgttcaggctgagagtgggtcaaagttaagggcctggaggaaatttacaagtcaagggcttgcatctgtagttctctatattttggagtaattatctacatgatatgtgtaggttctgtggcttttcacctaagaagcagaatctcattctagtacattgaagagtcatgaagccaaatctttgatggtctgtgtcagagacacaaatttaaggaatgtttggttaacaaatgttttgttcccactgatcagtgaagacaaaactgttcagctaatgttttatgaagcaaagaatgggcatttgtagacctgatgccatggctcacgcttgtaagcccatcactttgggaggctgaggccagaggatagcttgagctcagcagtttgagaccagcctaggcaacattgccagactttgtctcaaaaaaaagaaaagataagaccgggtgcggtggctcacgcctgaaatcccagcactttgggaggccaagacaggcggatcacctgaggtcaggagttcaagaccagcctgaccaacatggagaaaccccatctctactaaaaaaaatacaggtgcctgccaccacaccccgtctctacctaaaacctttgtacaaaaggcaaaagcatctaagtctgcccctcagagactttcccaatttgtacagtttattctacaattaaactaattctgtgaaagcaaagccaaactgctaataatgttgagttttactcaagccctataatccagttaaatagatatggtcatagaaatcactgccttgttaaccactcagttctttctgttttgcagacgcagactcatgcaaagataccttttccattacttcacggcctttttttaaaaaataaagccagatactgactacaaatgcccatttttttttcttttctttttcttttttttttttttttttttttttttttttgtgagacggagcttcgctctcattgcccaagctggagtgcagtggcgcgatcccggctcactctgatctctgcctcctgggttcaagcgattctcctgcctcagcctcccaagtagctgggattataggcgcacaccaccacgcctggctaattttttatatttttagtagaaacggggtttcaccatattagccaggctggtctccaattcctgacctcaggtgatctgcctacctcagcctcccaaagtgctgggattacaggcatgagccaccacgcccccgacaagccccgtttttgatcacagtaaagggggagaggctggatattgagttctgttaatgtaaaaattctggaatgaagacattcggagagcttcctggttggtgaacgcagtgatgttctaggagggtggtactcaagtcctgtagggaagggggtcctatactcccttccctggagggtctagtgaatattggcccttgtgtgactcctcccagaggacagttgaagtagagggctggggccttccaggggacccccacttccctggtcatatatatcttttccatttggctgttcttgggtcatcctttttttttttgagatggagtttcactcttgttgcccaggctggaatgcaatggcaggatctcggcttcctgcaacctccacctcccgggttcaagcgattctcctgcctcagccgcccaagtagctagaatcacaagtgcctgccaccaggcccggctaatttttttgtatttatagtagagatggggttttaccatgttggccacgctggtctcgaactcctgacctcaggtgatccacctgccttggcctcccaaagtgctgggattataggggtcattctttaaaacaaactggcaaacttgtgtttttctgagttctgttagtagtactagcaaattattgaaattgaggagcgtttgttggatttctatgcagttggttagaattaagggtgcctccactcctccctgctgtaccaccctcccagcacatcagggccgggactggcatctgcagtgggggctgtgtcctggggtgggccctggacttgtggggtctgggctaatgccaggtgatgtcagaattgaattactggatccccagctggtgttggaaagttagttgatactgagcagtctccacatatttgttgtcagaaaaaatgacatcacaggtcagaaccttacatcgacttggtgagtggttgctggtgagaattaagaccctggaggagggagcatttccacactgagaaggggacagtagggtgagtagtgctctgcggattatattttctaattactcaaatattcctcactcattgcctaggagaagccactctgagctacatctccacagtgagagtgtagtaaacttttgaatgtgggtaaaggtaaacaaataagccttgggcatttctggcatgtctccctaatttcatcctccttctctgtacccagaggtgaccacagtactgattctgaatttttttttttttttttgagacggactctcgctctgttgcccaggctagagtgcaatggagcgatcttggctcactgcaagcccagcctcccgggttcatgcgattctcctgcctcagcctaccgagtagctgggacttacaggcgcccgccaccacacccggctaatttttttgtatttttatttttatttttattttttttgagacagagtctctctctgtcccccaggctggagtgcagtggcgtaatctcggctcactgcaagctctgcctcccgggttgacgccattctcctgcctcagcctcccaagtagctgggactacaggcgcctgccaccacgtccggctaattttttgtatttttagtagagacggggtttcactgtgttagccagggtggtctcgatctcctgacctcgtgatctgcccaccttggcctcccaaagtgctgggattacaggcgtgagccaccacgcccggccatttttttgtatttttagtagagacggggtttcgctgtgttagccagggtggtctcaatctcctgaccttgtgattcacccaccttggcctcccaaagtgctgggattacaggcgtgagccaccgcgcccggccttttgtggtttctttgcctcagtccgttgcacacatgctgctgtctgaggctgtgggtcacccaggttactaaccattccactgcttgatttgagttgttagtattttatctgttgccaatgtaattgttgtttttgtctccaagtgctaatgcttcataaacttctttttttttttttgaggcaggtcttcttctgttgcccagactgaagtgcagtggtgcaatcacagctcactgcaaccttggcctcccaggctcaagcaatccttccatctcaccctcccaagtagctgggactacaggcgtgtgccacatgcctgattaatggttgtatttttttatagagatggggtcttgccatgttgcccagcactcaaacccttgggctcagcactgggattataggcatgagccactgtgcccagccatgcttcataaatttttttttttttttcgagacggagtctcgctctgtcgccaggccaggctggagtgcagtggcgcgatctcagctcactgcaacctctgcctcctgggttcaagtgattctcttgcctcagcctcccaagtagctgggattacagtcacatgccaccacacccagctaattttttttttttttttgagacggagtttcactcttgttgcccagtctggagtgcaatggcaaaatctcagctcactgcaacctctgcttcccaggttcaagtgattctcctgcctcagcctccagagtagctgggattataggcatgcaccaccacgcccggctaattttgtttttttaatagagacagggtttctccatgttggtcaggctggtcttgaactcctgacctcaggtgatctgcttaccttggcctcccaaagtgctgggattacaggcatgagccactgcgccaggccccacccagctaattttttttatttttagtagagatggggtttcaccatgttggccaggatggtcttgatctcttgacctcgtgatctgcctgcctcggcctcccaaagtgctgggattacaggtgtgtgccaccgcacctggctgctttgtaagttttttatacattggaaaaaaaaatccctgggatgtagcttatagatagattgacttgggaatgccaatggaatatatggattaaccatctgaccatgtatgcatgtgtatttactccttataagtagttctctttatttttctctgtgtgattacatgttgctttttacactaggattgagcattttttctgtgtggcctttcatcttctgtaaaatagttttcagtcatcttgtcacattaaagtcatttgtatatttattgcttcatttcttcccttttttctttttttaacttactctgtaggctaattctttttcatttatagggattgctaatattttgttccagggagtgatttatcttttcactccattctacattttgatggactcttaaatttttttgtttgttggcttttttggccgccttctgcatgcaccatcatcaagggtggggaagggtactcttcttgattttaattgagttgactttggctcttcctttcaggcctacttaattttcttgtaagagaacattctagagagtgtatatttagggcaacttgaatctgtgctcccaggttaaataaagaacactctccctactgtcaagttggaaaaaaaattgtaacttatgaaagtttgctactttttaaaattttaaaattttttattttctctctctctctttttttttttttttttggagacagagtctcgctctgccacccaggctggagtgcagtggcatgatgttggctcattgcagccttcgcctcctggcgtcaggtgtttccagtgcttcagccttccgagtagctgggatcgcaggtgtgagccaccatgcccggctaatttttgtagttttagtagagacagggttcctgacctcaagtgatctacttgccttggcctcccaacatgctgggattacagacgtgagccactgtgcctggctgcttttgtttttaagaggtttgtgtttttctgatttgatcttgtttatagctggagactggctaaaactttatccctgtcctggtgtggctctgggggatttcttggaggatatttaaaatgtgcctttcaagggatatttcttcattctgttggagggcctgatgcctagatgttatacccatgaccaggtgtccctctcacagcacacttgtttatacttgctctgtacaagcaggcaccttgtagatcttgtctgaccattgtcagtttaatcctagactagagtagccactaatccggtatctattagtggctaataaacactaccactctgttcctaccaagagagccccgattatgatagtagttaggttcaaatagtagtcaggtgtgtcagttaggcaattaggtgagactcggaggagacaattcaacaaacacaggaaataacagaaggagtttattacttataaatcccagaggccggctgtggtggctcacgcctgtaatcccagtactgtgggaggctgaggcaggcggatcacgaggtcaggagatcgagaccatcctggccaacatggcgaaaccctgtctctactaaaaatacaaaaatgagctgggtgtgatggtgcgtgcctgtaatccctgctactcgggaggctgaggccagagaatcactttaaccagggagtcggaggttgcagtgagccgagattgcgtcactgcactccagcctggcgacagagccagactccatctcaaaaaaaaacaaaaaaattcccggagagaggagagtagcatgtcttgtaggccagcaggtaggtggaactatttgtgacacataccctcagcctgtcagtggggagcaagggaaagagagggaattgtgggccaaatcctttattggggtccaaggtgttacctaacccaatttctcttcaggaggttttagttggtgtgtttagaagaaggaagcacagaggctaagaagagtcagcagacaggccttattggttttcccactcaatctattagtattagtccatactctttttgtccaattgcagttctacggggtgttccatacttttatcattcctattgaatgacgtctgtataaaacgccatgcttttatcattcctattgaatgatgtctgtataaaaggcccaagaggatagggtatggggagcttctggacagctgaactcagggagtcttgtattataataggaaggtgatcaagaactcatcctcatgccaggagcgagtcatactgtaactctaccggaatggaagctcctgtgcttgggacccttgtagactttgccctatgcttctccacctggctgtttatttgtagcctttaaaatagcctttataataaacttgtaaacgtgttttcccgaattttgtgagctgtgttggcgagttaattgagccaaaaaagggtgttatgggaccctcaatttgaagcctgttggtcagaagttccagaggcctggtcttgccactgctgtcggatgtgtggggtcagtctcgtaggactgagccctcaacttgtggcatctgctgctgtccccaggtagatagcttcataatcgaatcggtttggcaggcacccagcagctatatgctgcacaattgattacttgccttttttttttctttttgagacagagtttcactgttgttgcccaggctggagtgcaatggcatgatctcggctcactgcaacctctgcctctcgggttcaggtgattctcctgcctcagcctccccagtagctgggattacaggcatgcactaccacacctggctacttttttatttttagtagagatggggtttctccatgttggtcaggctggtctcaatctcctggcctcaggtgatctgcccgcctcggcctcccaaagtgctgagattacaggcgtgagccaccacatttggccaattacttgctttttgatgtggagaaatccccacacagttggtcacagaagccttttgtgttgatagttgtggtgtgaggggaatagcaaggtgtgtttttttcacttagatgatatgcagagggttgaatattctcttgtagataaccatttgtccctgtccctgtgtcgaagtatctgtaatctctatccctgcctgacagtgcctgctctgtcacaggttcttgggccttaaatagatgctcttgtttcagattttgctatttttcattggtctgtctgtctctctggtaataccatactctcctgattactacagatttcaaatcctcgatgtatgttagagaaagaacctccctatcttagtcatttttgcctgctgtaataaataaccacagactggatgcctgaaacaacaagcattaatttctttctttctttttttttttgagacggagtctcgctctgttgcccaggctggagtgcagtggcaccatctcggctcactgcaagctctgcctcccaggtccacgccattctcctgcctgagcctcccgagtagctgggaccacaggcgcccaccaacacacccagctaattttttgtatttttactagagacagggtttcaccatgttagtcaggatggctttcttttttttttttttttttgagacggaatcttgctctgttgcccaggctggagtacaatggtgtgatctcagctcactgcaccctctgcctcccggttcaagctgttctcctgcctcagcctcccgagtagctgggactacaggcgtgtgccaccacgcccagctaattttttgtatttttaatagagacagtgtttcgccatattgactagctccaagacagaaaggcagagtagattagagtgtatttttggtttctatggtctgccttgcagagaaaaaagagcaagtgaaaggaggtcagttgaagggcagagagaaagattctgttttctttcgattttttttttttgggggggacagagtcttgctttgtcacccaggctggagtgcagtgatgctatcttggctcaccgcaacctccacctcctgggctgaaacgattctcctgcctcagcttcctgagtagctgggattacaggcctgcatcatcacacctggctaatttttgtatttttagtagagacagggttttgccatgttggccaggctcgtctcaaactcctgacctcaggtgatctgcctgcctcagcctcccaaagtgctgggattacaggtgtgagccaccacacccggccttatactttactttttagagtagttttaggttcacagcaaaattgcacacatagtacagagttcccttatgccccctattcccactcagtcacaacccgtccagctatcaacattctgcaccaaagttgtacatttgttacaattgaacctattttgagacattattgtcatccaaagtctagcctacattagaatttattcttgcagttgtacattctgtgagttttgacaactatacagtgacatttctgttatggtgtaatacagagtagtttgattgtcctaaaaaccctctcatccacctatttatccctctccccctgacttctggcagccactgatttttgtactgttctatgattatgtcttttctgcagtgttacatagtttgaatcatacagtatgtagtcttttcaaagttgtttcttccacttagtaataagcatttgcgggcatgtgatcatgaaattttttttaaaaagtaatacgcatttaaggttcttccactaccttttagctcatttatttttagtacctccattgtctggaggtagctgttatgtatccatttgtctactgtaaggcatctcagttgcttccaaattttgaaaattatgaataacgctgctataaacatctgtgtacaattgtttgcctggacctaaattttcagctcatttggataaacctacctttggtctggaggttaagagacacccctgtgccacatgggatgggttgtaaagaattcactctgaaaatcaagtgaatgtgggcctatgatgaggtttgtgtaaaacccctgtgtgtgtatgatctcctgattcaatgagtacttttttttttttgagatggagtttcgctcttgttgcccaggtgggactgcagtggcgggatctcggctcactgcaacctctgcctccttgattcaagcgattctcctgcttcagcctcccgtatagctgggattacaggcgcttgccaccacacccagctaatttttgtatttttagtagagatgggttttcaccatgttggccaggctggtctcaaactcctgacctcaggtgatccatctgcttcagcctcccaaagtgctgggattacagacgtgagccactgcgcccagcctttccatgagtattaatctccttttttgtaacagatctcctagtgggtgctgcgttaaacagagctgaacaaataaccctatctgcctgaagcagggtgggagacaagaaacaagatataagtagaatatgcagtgtgtcagatggtgcttagtcctaaggagagagagaaagctggggaggagtggagaggcctgggctgtgtttgtctctgcaagcacctgtttatgtctctgaggtgttatctctgagggtttgtgtgtctacctgggtatggccacctatatgtgcagtgacaaagtgtgagtgattttgtatgtctgatggggagacagaggctgtgtttgtatgccctttaaaatctggaatgcttttatttcattttcttgcctgattgccctggtagcatcttttagcatgttaaatagctgtgtcaaaaacagacatccttgtcttgtatttgatcttagggggaaacattcagtgtcaccatcagtatgatgttatagtggggttttcatggataccttatttcaggttaaggaagttcccttccatttccagtttactgaatgtcttcatggtggaagaggtattgaaaggatattgacccttgtcaaatgtttttgatactgattctattaatattgtgattttcaaatgtgaaaacagtgttgcttttctgggctacgtcccacttaagtatagaagtttttgtttgtttgtttttgttttgagacggagtctcgctctgtagcccaggctgaagtgcagtggcgcgatctcggctcactacaacctctacctcccgggtcccagttcaagcaattctcctgcctcagcctcctgagtagctgggattacaggcacatgccaccatgcccagctaatttttgtgtttttagtggagatggggtttcactatgttggctaggctgctcgtgaactcctgacctcgtgatccacctgtcttggcctcccaaaatgctgggattacaggcatgaaccaccgcacccagacttttgaaaaatctttttggtaacagtcattctcgcaggtgtgatgtctcattgaggttttagtttgcatttccctaatgatttgagatgttaaacattttttcatgaatgtctttgtcatttatatttgctcttttcagaaatgtctgtttagatcctttgcccatttgaaaaattggaggccaggcccagtggctcatgcctataatctcagcactttgggagtctgaggcaggtggattgccagatctcgggagtctgagaccagcctaggcaacatggcaaaacctcatctctaccaaatatacaaaaaattagctgagcattgtggcatgtacctgtggtcccagctactcccagctgaggtgggaggatggcttgagcctgggaggcagaggttgcagtgagccaagattgtgccactgcactccaatgtgggtgtcagagtgagactcaatctcaaaaataaataaataataaaagttttaaattggattgttttcttgctattgagctgtttgaattctttatatattttggattttaacaccttatcagatatatggtttgcaagtattttctcccactccgtgtgttgcctgcctttccactctgttaattgtttcctttgctgtgctaaaaagctttttagtttgacatccacatccacaatggtgctgtcaaaaacagctacatgggaacttgtttatgtactctttctgcagtgtctggtttcacccagaactcttttgtgagattaagcaccttcctcatatcaggaagattgtgggtctttcctattattcacagctgaatccctgagttaggtttgattgtatgtgatcaaacatagtatgtattatttcctcaagcaacatttttggacatgtttcttagaaatagtttactaactggtttcgaacagcatgtatgctaacaaatgttaatgtctttttcatttgctgctaagttatataaaaaattccattgcaatcatggatcagatcaactttataataaactttataattttgtggcgttatttgttaaatattgtgaatcaggcggggaggggtggctcacgcctgtaatcccagtactttgggaggctgaggtgggtggatcatgaggtcaggagatcgagaccatcctggctaacacggtgtaaccctgtctctactaaaaatgcaaaaattagccgggcgtggtggcgggcacccatagtccctgctactcgggaggctgaggcaggagaatggcatgaacctgggaggcggagcttgcagtgagccgagatcatgccactgcactccagcctgggcagcagaatgagactctgtctcacaaaagaaaaaaaagaaagaaagaaaaaaaaaaaagaaaaattgtgaatcaatattctgtgcatacaattttaggtgtgtttttttcacataaattttcattttcatgctcatgtagtcacagtttttatcacaagaattatttctcattcacttatgataccaaaagttaaatcaagcttttaacctttttccaaagattatcaggaccatagctcctgtcaaagaaggtataaaaaaaagtcatcataaatatgatagtaaaccatacgtgactgtgtggtgtatcaataggagagcgctcaaaagaatttctttttttttttttcttttttttttgagatggagtctcactctgtcggccaggctggagtgcaagtggcacagtctgggcttactgcaacctctgccttccaggttcaagctattctcctgcctcaccctcctgagtagctgggattacaggcacaggtcaccatgcctggttaatttttgtattttttatagagacggggttcctccatgttggccagggtggtctcgatctcctgacctcaggtggtctgccagcctcggcctcccaaagtgctgggattacaggcgtgagccaccacacccagcccaaaagaatttcttctaggacgtgtgcttgcttcaggtgtattgattgctattcaaagcaagaagcttctctggattgtatactatgaagaagcaaggttatttctggccttggttattatgatagttcttacccagaagtaaaaaagatggagtggcgctaagtttattacctaaacactgaaatatttcttatgatgaattagacatggcttcccataagatacctcagttgaaatatataaattctaactattgataattttttttttttgagacagagtctggctctgttgcccgggctggagtgcagtggcgcagtctcggctcactgcaagctccacctcccgggttcacaccattctcctgcctcagcctcccgagtagctgggactacaggtgcccgccaccacacccggctaatttttttgtaattttagtagagacggggtttcaccatgttagccaggatggtcttgatctcctgacctcgtgatctgcctgcctcggtctcccaaagtgctgggattacaggcgtgagccaccgcccccggccaactactgataatttttaaaagtctcccttattagtcaaattaggctaatgcctctaggaaagttgtcagaatataaacctagcaagggacagagacatgatcactattctaatcaagcctctcttgctcagataatatgctcttgatgctaatttttcaatatgcctcatatgccagaactgtagactcagaacatccagaattaagcacaaatgatgcaggcactgaaggctctgatatgggaacacaaagtgaataaattcttgaaatcctggtgcttatatttttgtgagaaaggagaggggttgaaaaaatggtaagactggtttataagaaggaaataagcactttgaaggaaagtaaatgatggtgtgagataatacggaagctgagggtgtgtgtatatgttctctgtggagggtggcaacatcagtgagtgaagaaatgtcaccatcggtcatttatatttccacctcttatacatcttcagcaccatttcaggaactgcttaagtgtggatgtagatagtgcatagcaatatagacagtcctgcctttttgaggttaacaataatgattccccgtaaagatataggtatggcttattgtcatttttgcattggttaaaaattttaatgcatgtaatatgtgatgctgactttggacatgggtatctggaacctggaggaaggcacaccactgcatacggtgtgtgctagaaccacgttggatccctgttgaaacatcttaagtgttctgccccttaagccacaggggcggagcctgaagttatatccagttaggggtgccaggatggcatcctacttattgtccaatcaggcgcgcctcagagccctgtctgcccccaacctcaccccaccctgtacgatcttgtggtgaattttcttttcttgagctggctgcattacctttcttctggctcctggctccactgccctggctctgtgctctgtgctggccgtggtagccggagggaggacccaggagaccccgaagatgggaaatggcgagtgtgggaaatggcaagtgtgcaggggcctggggtccgacatggctggaggggcccaggcctcctcgccatcagcatccgattctgtttcatctgagttgctcaaatgtgtgggaagcagggtatcaaatccacccccggcctaactctccttgatctggcagcaaactgctaaattgtaggtataatttctgcagtccccaacaccagcttctgttctcggatgcacagtgttatcaactatttggtttttttgttttgttttgtttttgcatttgtttttgtttttttttttttggtggagtctcattctgtcgccgaggctggaatgcagtggcgcaatctccactcactgcaatgtccgcctcctggattcaagcgattttcctgcctcagcctcctgagtaggtgggattacaggcacctgccaccacgcccagctaattttttttggggggggacagagcctcactgagtcgcccaggctggagggcagtggtgtgatcttggctcactgcaagctccgcctcccgggttcacaccattctcctgcttcagcctcccgagtagctgggactacaggcacccaccactacgcccggctaatttctttgtatttttagtagagacagggtttcaccatattagccaggatggtttcgatctcctgacctcgcaatccgcctgtctctgcctcccaaagtactgggattacaggtgtgagccaccgcgcccggccatttttttgtgttttttagtagagatggggtctcaccgtgttggccaggctggtctcgaactcctgacctcaagtgatctacccaccttggcctcccaaagtgctggaattacaggtgtgagtcaccatgcccagctgactatttgtccttccttctccattagagaaagatgtcatattttaagtttatcatttttgcagaaggcagtggatgacagttttataaagatttcttttatgtttgtgaccttttcgcctgagaggtaagcagagaataaccacctgaaactccattgtgaaaaagctttgtgtctctcttttatcttctctaagtgcaaacccttatcagaatgcctttgcattgaggttcccctttggaaactttgcagggttgattgccctcagcctgtcctctcttttcctggtcctggggttcagaactgactggggctgccccaagaagcccatagcttccatgtctcttggagggtctagtgagtatcagctcatgtggcccctcaggggagcccctggatgccttggacctagaagcagtgacatggtttactcttcctctgaaaagctcacctcttgggacactcagcttgtttttctctagccccagttttcattctttggagacatgttagtggtcagctaattggatggcagtattgaggggaaagacagaaaatgattcttgccctctggattctctcagagtacttgaagggagaaaaatgatcccaaaagacaaggaaaacccacctctgccaggttatgcaagaacttgaaaagcaaaatgcacttaggcatgggggtgggggcacagtccactgtctctgggaagggtcggtgagcagcactttagtgacaggatgggggttggggggatgtcccatgtgataggatgacctgactgggcagttaagtcagatttctctgtgttccaggttagagtggccttccctgattttgtcaccttaagaagatttgtttacttacttcatcatgtaaaatgtattttaccattaaagcttgaaagataggctaaaatatttccaaagagatgagaggtgtatctcagaaaaataaatatctacccttatatttgttaaaaatttgtatttaatttttccccccagaacatatatgcagtaagtttctcaggtctgttcttttttgtgattttgttgttgttgttgttgttttgtttttttttggtttgtttgtttgagacacagtctggctccaggctggagttcagtggcacaatcacgtctcactgcaacctccacctccccggttcaagcaatcctcccacctcagcctcctgagcagctagaaccataggtgcaggctacacgactggctaattttttgtagagatagggtttcaccatgttgcccaggctggtctcaatctcctgagctcaagtgatcctcctaccttggcctcccgaagtgctgggattttaggcgtgagccaccactcccagctccttttttgtgatttcaaatagaatcctagagtgtagccttgagaaggctacagggagaaaaagctcagagaaatagggagaatcactcttcattatggcttcacataactgaatctatctatctatctatctatctatctatctatctatctatctatctatctatctatgtttatcttgagacagggtcttcctcttttgcccaggttggagtgcattggcacccatcatagcttgctgcattctcatactcctggtctcaagcagtcctctcacctcagcctcctgagtagctgggactacaggcgtgcaccaccactgctggctaatttttaaatttttctgtagagatggaggttctcactgtgttgcctaaactgatgttgaattcctgggctcaaacaatccttctgcctcaacctcccaatgtgatggaattacaggtgtgagccagttcacccggccactgatacattttgatgagaaagtaggtagataaattggtgaattcaccaatttattttcaccaatttagtgaagattcatcaagctgggtgtggtggctcacgcctgtaatcccagcacttcgggaggccaaggctggcagatacttgcggtcaggagtttgggtccagcctggccaacatggtgaaaccccatctctattaaacatacaaaaattagctgggtgtggtggcacgtgcctgtactcccacctcctcgggaggttgaggcgggataatcccttgagcctgggaggcagaggttgcagtgacccaagaccctgccactgcactccagcctgggcgacagagcaagactccatccaaaaaaaaaaagagggctgggtgtggtggctcacgcctgtaatcccagcactttgggaggccgaggtgggcagatcacgaggtcaggagattgagaccatcctggctaacatggtgaaaccctgtctgtactaaaaaatacaaaaaattagtcaggcgtggtggcaggtgcctgtagtcccagctactcaggaggctgaggcaggagaatggcatgaacccgggaagcggagcttgcagtgagccgagatcacgccgctccagcctgggcaacagagagccagactccgtctaaaaaaaaaaaaaaaaaggtaaaaaatccttcattagtctcatttagtacttaattatatttgatctgcaggataggtacaagcttgcaagtattctctcttagtataataacagaagatgggcttaattttcccagtaaccaattgtgagaacacatgcgaaatgcttcctggagtgtttctgggggctcatcaggtgggcactatgtgttgcgcgtgtaacaaattcccaaactctcagaaggtgggacgccagaaattttcatattttttccataaagagtttaggcaccgagctactcttacataggtcattgggctccttccccaaatccgtttcccagataccaggaatggatgtgatgcaggacaggtgcgccctaaaattggggcttatcccaggatggtttccagctttgcccagggaagaattcaagggcaggccagtggtgttagataacagtgttttatttaacagtactggtctttgtggatcagtgctaactcataggcagtacacccagagtcagcaacatatggtctcttggcaactatatttatacccactttcaattatatgcaaattaagtggtgggttatttaaaactttctaaggaaggaatgataactttcaggtcattgccatggcatttgtaagctgtcatagcattggtgggagtgttttatgctaatgagcagtgagagcatctagagatcgctgttcttgtcgtctgctggttttggcccctttctttactttatcctacctgtgccagatcttgttttggccagtagggttgtgatcagaatacaagtcctgttggtctcctacctcagatgaatgttgtgaggagtgaggagcctttttttaagggtaagcagtctcaggactgctaatataaactcttttgcatagtaggtggtaggacttcgttatgacaggttctacaggtccactgtatgagcagacattagctgggactcaggcagcacgtattactccttgcaaccaccaccaagaaagatgatcagacactgctattgttctacccgatagttccattctagtatgagagttgctgtgtggaaggaagtgagtatgatgaccaaacagtggagtaaatgtttgcagacccctgaaacatgtgaacttcttatgaattgagtacagctccccagccctgtctgtctcacccattctcctctccacatatgtgggatgtttcaggactcggtggcttttgaggatgtagatgtgaacttcacccaggaggagtgggctttgctagatccttcccagaagaatctctacagagatgtgatgtgggaaaccatgaggaatctggcctctataggtaaggattgtatacttccatcacttagcaattaaagaagaagtgcttcttgtgcagtgatgctgttccatggtttgcatcatggagggagagtacttggggggctaaaacaggcatagtcacagggtatcatgaacctagaatctaataatttttctataattttgcactaattcagaatttttctgggtctctgttttagggaaaaaatggaaggaccagaacattaaagatcactacaaacaccgagggagaaatctaaggtaatttgtactcagagaaagcaaattcacttgaaagtaccttagcatgtcatgaaattttaaaaacaggcaaacataactgataagccaagcttcaaattgatttattttttgaatattttccccaaatacatattcttcagtgtaaacagatgttcagtttttataaaaatgttcatttgtcaacagaattaagaaactatttaagaatatcactgtttgagtgatagttgcggtcaagcccattgcagagcattgaattcattcatgctcaaacaaatcagacttggcatcgagtctacgctttacctgataatattgaaaatgcaagtttaatagctattaatataaaatgattaacaaatccttagtaatgtccgtctcattttttacagaagtcatatgttagaaagactctatcaaactaaggatggtagtcagcgtggaggaatttttagccagtttgcaaatcagaatctgagcaagaaaatccctggagtgaaactctgtgaaagcattgtatatggagaagtcagcatgggtcagtcatcccttaatagacacatcaaagatcacagtggacatgaaccaaaggaatatcaggaatatggagagaagccagatacacgtaaccagtgttggaaacccttcagttctcaccactcctttcgaacacatgagataattcacactggagagaaactctatgattgtaaggaatgtggaaaaaccttcttttctctcaaaagaattagaagacacatcatcacacacagtggatatacaccatataaatgtaaggtgtgtgggaaagcttttgattatcccagtagatttcgaacacatgaaagaagtcacactggagagaaaccctatgaatgtcaggaatgtggaaaagccttcacttgtatcacaagtgttcgaagacacatgataaagcacactggagatggaccttataaatgtaaggtatgtgggaaaccctttcattctctgagttcatttcaagtgcatgaaagaattcacactggagaaaaaccctttaaatgtaagcaatgtggtaaagccttcagttgttccccaaccttacgaatacatgaaagaacccatactggagagaaaccttatgaatgcaagcagtgtgggaaggccttcagttatctcccctcccttcgactacatgaaagaattcacactggtgagaaacccttcgtatgtaaacaatgtggtaaagcctttagatctgccagtacctttcaaatacatgaaaggactcacactggagaaaaaccttatgaatgtaaggaatgtggggaagcattcagttgtatcccaagtatgcgaagacacatgataaaacatactggagaaggaccttataaatgtaaggtatgtgggaaaccctttcattctctgagtccatttcgaatacatgaaagaactcacactggagagaaaccttatgtatgtaaacattgtggtaaagctttcgtttcttcaacatcaattcgaatacatgaaagaactcatactggagagaaaccctatgagtgtaagcaatgtgggaaagccttcagttatctcaactcctttcgaacacatgaaatgattcacactggtgagaaaccctttgaatgtaagcgatgtggtaaagcctttagatcttctagttcctttcgactacatgaaaggactcacactggacagaaaccctatcattgcaaggaatgtgggaaagcctattcttgccgtgccagctttcagagacacatgttaacacatgctgaagatggaccaccttataaatgcatgtgggaaagcctttaatgctctgggttcatgtcagatacattaaaatactcactgaagagaagccctatgaatgtaagtaacgtgggaaagcatgaaattctgtcagtgccttttttaatacatgaaagaattctagagagaagccatatacatgtaagtaacatgggaaagctttcaatcattttagttcctttcaaatacatgaaagaactcatcatggagaaaaccaaacaaatgctttttggaaaggaacccatatttgagagaaaccctgggtaaagggtgtaggaaaggttttgtcatcacacaaccctgtcacacatgaatgtgtagtggagagaaccttggtaaatgtaaagagtgtgggagagcctttagtcattttagttccacttgaagccatgaaagaacacacaaaagagaaagctcttgaatataagcaatgtccacacgtttttagccagcccacatgctttcaacaacatgtaagaatgtaccctggatcaaaacactataaatgtgaaaactacaaggaaggttttccattatacttttaaagtcatttgagggctctggctctgtggctttgtgggttaaagtacttgtctggcaaacaggagatgctggatttcaatcccagcagggcctcactagttgaggtattgaatttgaacagatgttttggctctggctgggtgtggtggctcacacctgtaatcccagcactttgggaggctgaggcaggaggatcacttgaggtcaggagtttgagaccagtgtgcaaaacatagcaagacctcatctcagaaaaaaaaaaaaagtcatttgaaaacttctaatacagcaaaatcctataaatgtaagtacttcaaaaagcctcatgcatagcgggtcatgtagtctctagaaaatacataacctgatggaaatgtagaagctatatgtatattttgttaattagtggctcatatttaaaatagttctctgactatggatttcaaatgcttaatctcacaaagaaatgttaaattgatataatcctgtaagtaatctgaaagcaatagtgcatgaatttcataggtagtgttgttttaggtcagtaaataaaatatttgtctttccattttgaaatgtgtttaatccaacaatgaatttaaatgtgtttctcatattcaggtatgttaaattgtatatggttgcttaattgttctgtgattgaggaccactgaaaaataagtcttaataaatgttggtatgaacctacttgcttcatttagcaggttcttgattccctttccacattatatacattccatcatatttattggaacagctccttttttttccttttttcttttttctttcttcttttttctttttgagacagggtctcgctctgtgctctgttgcccaagctggagtacagtggcatgatctcggctcattgcaacctctgccttctgggttcaagtgattctcccaccttagcctcctaggaagctgggactacaggcatgtgccaccacacctggctaattttttgtatttctagtagagatggggtttcaccatgttggccaggctggtagaactcctgacctcaagtgatccacccacctcagcctcctaaagtctgggattacacgtgtgagccatcacacctagcccattttttttttcttggctcaaataattttattttgcttcctattaaagagttgttgttaattctaagtatgtaaagtttatcacagactgtagtctcgtgaattattattttaacctgttgttctttactccttgttatttattctggctgctctttgtataattgattttgggataaggagacagctatgatagaataataaaatctaaaatgggagatgcctttcatggattgtgtcatgtcaatctgggtaatgggaactaaacttttcagacttcatttctttctttctttctgaaatagggtctcactctgtcactcaggctggagtgcagtggcacgactgtggctcactgtaacctcaaactctggagctcaggtggccttccgacctcagcctcccaaatggctggaactataggtatgtgccaccaagcccagctaatctttttatttttggtttttcatctttttttttttttgtagagatggtgtcttgctatgttgcccagactggtctcaaactcctggcctcaagtcaccctctagcctcagcctcttaaagcactaggattacaggcataagccactgtgcctggcccagaatttctttctttcatggttacctgtagactgcatcaatagcctaaattcctggaagtttagaatgcagaagtgaagaacgcattagtcagattttggaggcatcatacggagagacagatgcatatgggctgtttggacatggtcatctagcccattttcctgattctttgccctgccaatcaagagtatcctcagccgggtgtgctggctcacacctgtaattctagcactttgggaggccaaggcggtcggatcacctgaggtgaggagttcgagaccagcgtggtcaacatggtgaaaccccatctctactaaaaatacaaaaattagctgggtgtggtgtcgcgtgcttatagtcccagctgaggcaggagaatcgcttgagccagggaggtgaaggttgcagtgagccaagatcatgccactgcactccagcctgggtgacagagtacagagtaagaccctgtctcaaaaaaaaaaaaaaaaaaaaaaaaaagagtatcctctaatccaccactagctacttcacctccatgttctcaaagttatggatttccatagatgtttttaaaagcttcatatcaaagattcagctgccatttggatattcctgaaggccctaatatatctgccaagtaatcagttcatattgtcattgttgggaatagtctgatgatctgacttggttcctgtacggtccagtttgtacataaacatttttgtccatagggacagtgagtgttactgatgcaggttgagagctacaatggcactatccaaaaacaaaacgaaaaaccctacatggagcttgttcctctgctgcattatgcagagatgggtctcaccccgttctttcatgtgagaataagcaccttattcattatagaaacattgtgggtgtttcctgttactcatagctgaatgcagtccctcagtttattttgaattatgtttgagtacatatgattacaaacaatatacatgtcctcctcaaacaaaagttctctacacatttcttagaaatattaacagtatgcaagcaacttgcatactgtctggtgagttttgtatttattgagaatatatattaaaatatcccattccaatcatggatccgataaactttataattaagctatttgtccaacattgtgagtcaatattactgtgagcttacaacttcaggcctttttttcctcataaattttagttttcatgcttatttgattacaacttttatgatgatagtagtttttcatatgcataataccaaaagtcaaatcatgttgtgagtgatttctttccaaggactatcagggacgtccctgttgtcaagcagggtgtaataaattgtggtaataaatactaccacaggccgggcgcggtggctcaccctgtaatcccagcattttgggaggccaatgcgggcagatcacttgaggccaggaattggagaccagcctggacaacatagcaacaccctgtctctactaaaaatacaaaaattagcctggtgtggtggtgcacatctgtaatcccagctacttgggagtggaggttgcagtgagccaagcacgccactgcactccagcctgggcaacagagtgagactctctcaaaaaataaaaaaataataaataccaccacaaaccagtaatgactgtaaggtgtatcaataagagggtatttaaaagaatttattgcagaacttatgctgctttttggttgcttgattcctatttaaggaagcaaaaaatttctctgtatttgatatagtgaagaggtgaacttaattctacccttggtaattctttttatttttgagacggagtcttgctctgtcacccaggctggagtgcagtggcgcaatctcagctcactgcaagctccgcctcccgggttcacgccattctcctgcctcagcctcccgagtagcagggactacaggcacccaccactacgcccggctaattttttgtatttttagtagacggggtttcaccgtgttagccaggatggtctcgatctcctgacctcgtgatccactggcctcggcctcccaaagtgctgggattacaggcatgagcaaccgcgcccggccctagtaattcttttttttttttcttttgtgagacagagtcttgctctgttgcccaggctggagttcagtgatgcgatcttggctcactgcaacctccacttctctggtataagtgattctcctgccgcagcctccagcgacagtgccagacttcgtctcaaaaaaaacccagaaaacaaaaagacaaaaacctttcagaatacttcctgaatgatctgccagagcctgttttacagctttttttctggaggcggaggggacatggtcttgctctggagtagcttggattacaggtatgtgccacgacacctggctaatttttgtattttgagtcgagacgggttttgccatgttggccacgctggtctcaaactcctaggctgaagtgatcggcccacctcggccttccaaagtgctgggattacaggtgtgagccacagcacccagctgaatatacatttttctaaggaagataaacaactgagcaaggggacctgaaaagatgctggacatcattaagtaaatgctaaacaaaaaggcaaggaaataccacttcaaacccactaggatgggtagaatgaaaaagtgagataataacacatgtcaaggatatggagaacttggaaccctcatacactgctggtgagaatggaaaatagagcagccgctttgcttttttgtttgttttttaaatttttcttttttaagagatggggttttgctctgtagcccaggctgtcaaggctcactgcactctcaaacttctggattcaagaaatcctcccatctcagcctcctgagtagctgagaacacaggtgtgcaccaccatgcccaattaatttttctttttcttttagagatggggttttgctcttttgtcagggctggtcatgaacttttgggctcaagctatcctcctgccttggccttccaaaatgctgggattacaggcatgagccaccgtgccctgccaggagtttcttttttgaggtaatgaaaatgttctaggcctggcgcggtggctcatgcctgtaatcctagcactttgggaggctgaggcgggcggatcacgaggtcaggagatcgagaccatcctggctaacacggtgaaacccgtctctactaaaaaatacaaaaaattagctgggcgtggtggcaggccctgtagtcccagctactcgggaagctgaggcaggagagtggtgtgaacccgggaggcggagcttgcagtgagccgagatggcgccactgcactccagcctgggcgacagagcgagattccgtctcaaacaagaaaaaaagaaaatgttctaggccaggtgccgtggctcatgcctgtaatcccagcagtttgggagactgaggcaggtggatcacttgaggtcaggagttcaagaccagcctggccaacatggtgaaaccccgtctccactagaaatacaaaaatcagccaagcacagtggcgcgcgcctataatcccagctactctggaggctgaggcagaagaatcgcttgaacaccagaatcggaggctgtagtgacccgagatcgcgccattgcattctgcactccagcctgggcaacagagtgagactccatctcaaaaaaaaaaaaaaaagaaaatgttctataattgactgtggtgattatctgtttgcatctttgaatatactttactgaattgtacacttaaaagggatgcattgtgtagtgtgttttattctgatatagcttttcaaataaatatgacttcagatttttgattaatctgttaagcatactaagagtttccagatataccttaatttacatcactttttattgttcatttttgtatcagtgaaaatagggattcaattaccttaggtatatcatagtcgtttacatttcaaagttctctgcgaacacaatctgtaacctatttaaaataaattttcctgtagtgtgaaatgtacacttcagagtttaattgaacatatctcacagctgtggttagtctgataagcgtccttgcatccatgctagggatgtggggttcaaagagattgtgtgtaaaaggctctggaggccaagggattctttatttaaagtaaatgtgtggggattggggaaggaatgggtggaggtctcaatgccgttagccgtcaatgtcagaatggagctagactcattacacacggcgaagtcacttttaaagtgtctgtgtttgtgaacggagctcacagttccacgagtgccctctagactcaggccaagtccctggcccccggaggagtcagaccctcttgttccaatctggacttgcctgggtgaccctcttgctgtggatttgttccttaaagggtcactacatctggcaactgaggctggaattcgccgcgcacacttttgtccccgcgttcagaaacagctgcgacaggatgccagagtccatcgagaggctgggaacaagttcggcttctactcaactgcccctcgctgggactggtttccccccggactgaagcagggtttccccggcgacatgacctttcgcagctctgtcactccatgtgaagagggcggggcttcgtgaactgtccaatcagaggcgccacgtggaaggtgggtggggcaatgcggcataaaagaggtgggcgtcgtacgtcgttacgcagcgcggttgctgggcacctcgactatcacctgaccgtagtaatatctcccgctacgcgcgttgtgaccaatgctgcatacaggagatgagggaggacggccagacacctggaagccggaaaatggtgagtgtgcggggccggtgtcccgagacctgaggagggacaggttggaaccggccggaaccggctgtggcgggacccggggctcccctcggcgactctggggtctgggacccgggtccctctggcgcagctgggccctcagtgccctcggccgcagagtggggctgggctggcatccgggaccccgggcatcctgtcccgttcctgcgcgacgcctgcggccccggcctcagcctcggcgccctctctgggcagctgcacgccgcagcctcgtgtctccccagattgcacgggagccccgggagggtcatggggaggattccgactcgtgtgtggggttcgtgcgtgggaggagcagtgttctgtgtgatcctcagtccctcctttctccataaaggtcacccatcttcccttgaggtttccaaatgtatggaaagcagggtgtcaaatccataatcctgtctccagactatctcttcctggggctggcagtaaattcctaagtttgcggatcccttcccgcattcccaaagtctaacgccccctctccagttcacagcgtcattgtcaattgtttggcctctggtgcatttcacacggacgccgtgtttctcatttttccgaagaaccagggatgactcgttttaacggatttattttttgtttgcggatattttacatgggaggaaggcaaagaatacccacctggaattgttacataaatccttatgactctccttccagtatctctcctgagcacagacacactgcaggaactcttgggttggggctcctctttggaaacttccctgggtgacctgtcttttttagcagtttcaggtcggcactgcccgtccttgactttgtattcttgaaaagatttgaccactcacttgtgtgtcattttcttcatgtatctgaaaggtatataatcaatagctactaaaagtattataattttttatttctaatttttgtgggtacatagtaggtgtatatatttatggagtacacgagatgttttgatgcaggcatgcaacgtgaaataagcacatcgtgaagaaagggatatcccctcaagcatctgagttgcaaacaatccagttacactctataagttattttaaaatgtacagttctgtgtggtttttttttccacccattaattgtcctctcctttctctcaggctcccactacctttcccagcttctaataaccaccctactctctaagtccatgagttcagttgtttgattttctttctttttttttttttttggagatggagtctctctctgtcacccaggctggagtccagtggcgcgatctcggctcactgcaagctccgcctcccgcgttcaagccattctcctgcctcagcctcctgagtagctgggactacaggcacccgccaccatgcccggctaacttttttttgtacttttagtagagacggggtttcaccgtgttagccaggatggtctcgatctcctgacctcgtgatccacctgccttggcctcccaaagttttgggattacaggcgtgagccaccgtggccggcttgtttgatttttataatagatcccacaaataagtgagaagatgtgatgtttatctttctgtgcttggctgatttcacttaacataatgatctccaattccatccatgttacaaatgactggatttcattcttttttttttatgactgaatagtactccattgtttatatgtaccactttttttttttttttcccggcagagtctcactctgtgcactggtgtgattttggctcactgcaacctccgcctacagggttcaggcgattcttgtgcctcagcctctcgagtcactgggattacaggcatgtgcctccacacggggctaatttttgtatttttagtagagacgggatttcgccatattggccaggctggtctcgaacccctgatctcaggtgatcacctgcctcggcctcccaaagttgtaccacattttaaaaatccattcatctgttgagggacacttacattgcttccaaatcttagctattgaaacagtgctgctacagatactggagtgcagccatcccttcgatacactgatttcctttcttttgggtatattcccagcagtgggattgctgcatggcatatggtagctcaatttttagttttttgaggaacctccaaaccgttctccatagtggttgtactaatttacattcccatcaacagtatacaaaggtttccttttctccacgtcctctccagcttttgttattgcctgcctttttgacttaagccattttaactggagtgagatgatatctcattgtatttttttttttttttttttttttttgtatttttagtagagacggggtttcaccgtgttagccaggatggtctcaatctgctgacctcgtgatctgcccgtcttggcctcccaaagtgctgggattacaggcgtgcgccaccgtgcccggcctcattgtagttttgatttgcatttctctgatgatcactttttcatataaacacctttttatatgcctgttcgccattcgtatgtcttgttttgagaactgtctattcaaatctttcgtgcattttttgattggattattagactttttttcctgtagcgtttgagctccttatatattctggttatattaatcccttgacagatgggtagtttgcaaatattttctcccattctttgcgttgtgtccactttgttgattgtatcctttgctgtgcggaagctttttaatttgatgtgatcccatttgtccatttttgctttgcttgcctgtgcttgttgggtattgctcaagaaatttttgcctggaccagcgtcctggagattttccacaatgttttcttgtagcagtttcctgatttgaggtcttcaatttaagtctttaatccattttgatctggtttttgtatttggcaagagataaagatctagtttcattcttttgcatatggatatccagttcccagtaccatttattgaagaaactgtcttttccccagtgtgtattcttcacacctttgttgaaaatgagttcactctagttgtgtggatttgtttctgggttctcccttctgttctgttgctctatgtgtatgtctttatgccagtaccatgctgttttggttactatagctctgtaatataatttgaagtctggtaatgtgattcttccagttttgttctttttgcttaggatagctttggctattctgtgtcttttggggttccatatcaattttaggattgttttttgtatttctgtgaagaatatccttggtattttgatggggattgcattgaatctgcagattgctttgggtaaatggacattttaacaatattgattcttacaatccataaacatggaatgtttttccatttttttggtatcctcttcaatttcctttatcagtgttttatagttttcattataaagagctctcacttctttggttaattcctaggtatttaattttatgtgtggctattataaatggggttactttttaaatgtatttttcacattgttcactgttggcatatagaaatgctactgatttttgttgattttgtatcctgcaactttactgaactcgtttattcttacagttttcctgtagagtctttaggtttttacaaatattaagattatgtcatcaaaagtataaaaaattttaaagaggcaagaaagaggtgaatttcataaaaaataaaacacttcagtattacactgaaattggtgaacatttttttctttttttcttcgccttaggttgtgtagtaagtttctgaggtctgttcttttttgtgtggtgatttcaaatggaatttcagagcatagccatacaacacctagaagtatccaaatatgattatgagaacatttattgccatagaaataataactgaaatttcttttttttttttttttttttttgagacggaatcttgctctgtcaccaggctggagtgcagtggtgcaatcttggctcactgcaacttctgcctcccgggttcaagtgattctcctgcctcagcctcctgagtagctgggactacaggcgccaccactattcctggctaatttttgtatttttagtagagtcggggtttcaccatgtttgccgggatggtctccatctcttgacctcatgatccgcctgcctcagcctcccaaagtgctgggattacaggcatgagccaccatacccggcccaataactgacatttcattttctgcaaacaatagacatttgtggatttcagggactagggctggtttgctaaggtgccttacaattttcttaacactttacacatcaatacttgatttgagagattttgcagaattcttcaaacattgggtttgtctcagttaaagtatctgtttaggctggctgtgttggctcatgtctaatcccagaactttgggtggctcatgaggcaggaggattgcttgagtccaagagttcaaaatcagcttgggcaacatggcaaaatcctgtctttacaataaaataaaaatacaatatcagtggtggtccaaagtaacatcactgcccaagctaaggccacccttgagcctgccaagagcagtaattaaaggccctgttggttcttcttggggagcctccctgttcataccattaagccctttataccaagagaagccacagagcactggaaagctggggatccacatgcacatgttttgggtggaggggttgctttctgaggttgtaattgtggttttcttgggcgtgttttttagacatgaggtttgttttgcattcacaatgttgccacattcagagtataattcttacatactgagaaagcatgtgaagttcaggagtgctgtctccaggacacagggttaatgaatttcggaggttatttttgggccagaaccttaaagtaaatccagctgagagtttcttctgcccaagaattgaagcctgggagaggaagtattttcacactgccaggggccagttagggtgtacggagctcccagagttcattcctgtggctactcaagtgtctcttcccttcatcaccagggactattccactctagaagttacatgtcagagggagagcatggacctcaagcatgttaaggtgtttaacctcttgaatgtgggttttccttgtgaattgtggggaagcagcctgcttatctgagctaattagaatatttatgtttcctttggattattttatctgttgagcattgtggcccttcaactctggtttcccttattttataattttattgcctgtgtcagtgtgtaagattttagtttctttcactttgaaaatgaaggttgttagatatggtgggagtaagcaagaaaattctggaactaaacaaaatgtttgtttcttgaggccagagaacctcaagatacgagatgagtatgtttaagttctcaggtacttttttcatttttagatcagtttttgtatgtgattgtccataaagaactttgaaatttaaaagggtatacagttgctaagacaaatgacttcctgattccgttggtaagaggaaaacacagttgaattcttgttttaattgatgtgaggaaaactactaaagtttatataatctttgaaactcctgctatatttaaattaggcccaaatccataatgcattttattttatttatttatttattgagacagagtctcactctgtcgcccaggctggagtgtagtggcacaatctcggctcactgcaacctcccagttcaagtgactctcctgcctcagcctccccagtagctgggattacagccgtgtgccaccacacccagctaatttttgtatttttagtaaagacagcgtttcaccatgttggccaggctggtctcaaacccctgacctcaaatgatcttcccaccgtggcctcccaagttgctgggattacaagcgcgaatcaccacacctggcccggaatccgtatttaatgtttgctaacaacctaagactcagcgttccctttttcccttgtgaccacacctggacaagctgatgagtctaagggctcccttctctgtcataggcaagagatttaaaccatgtaactacatgcccatacaggggatcttgtgcccaactctaccccaaccacagtaaacaaccaggccaggctcctttctttgctctctcaggccatttcagttatgcttgatgggtctgtcctgctcttcccaagatctcaacaatgtgagcaataagccttttaataccccctctgtgagtgccagaccatcatcagttttgtcagaactatgtctctgaaggtgaccacaatgattggtgccgtgagcatgttgtccagacactgatcaccacttgtgggtccttcatctctttattattattttttgagatggagtctcgctctgttgcccaggctggagtgcagtggtacgacctccgctcactgcaacctctgcctcccgggttcaagcgattctcctgcctcagcttcctgagtagctgggactacaggcatgtgccaccacgtccagctaattttttgtatttttagtagagacgaggtttcgctatgttagccaagatggtctcaatttcctgacctcgtgatctgtctgccttggcctcccaaagtgctgggattacaggcatgagccaccgcacctggcctttatttttttaattattattgttattattattttttgagacagagtcttgctctgtcacccaggctggagtgcagtggtgtgatctcagctcactgcaacctctgcctcccaggttcaagcaattctcctgcctcagcctcctgagtagctgggattacaggtgtgcatcaccacgcccgagttatttttgtagatcttctcttgctctgacttgctaacccactgtcctgcctgatggccaacatgtccagtgagctactgctggctagaaagctggtgcttcgagtgtgctgctctgtgttgcatgttgagccctaccaagtatgggttctatattcaactgactgagtctgcctttttaaaaataattctttggcatttaagagtaggactatgctattggacccctccttcaattgatgctggatctatctgtgtgtttagagtgaagctgtgcctgatgctgggttggcccggtgtgcagggtgccagggtgcagcgggagggtggactatatacaccctgtacaagaggtgctcctgaaacagtagtcatttaaagaggagagagaaagggaggaaaggcagccatcaggtggcgcactgagtccacaccccaaaaggcaaagggctcaccaggaccttaaggacctctgctgctgctgctgctgcttcaggtacctttatcacaacaaatatcctgaccctggggcatagacgggacaatatccatgattccccagtggcataacaaaggggttagtttaaacctgacataggctagagatccttaaaccctatgaaggaactattgccatggaggaggcccctaactctgatgacactgaactgagcctctctggaggaaaaaaaattgtaactgtcccattagagaaagtaccccttttccttgaagtatatccactgaccaaaaagaaagaaagaaaaataaaaacatggaaggaagggagggagggatctcttgacctcttaaactcttagcctggggaacctagtgtgaccccatgtctctcttttttttttttttaaacaatgctagtaataagagggtttaaacctctgtggtttactgatttactctattaaagtaacttatcatacatattttttatgtttgtggtgggatgctaaatattaggatgggcattgctttattttttatttatttttatttttttattatttatttatttatttattttttgagacggagtttcgcttgttgcccaggctggagtgcaatggcaccatctcggctcactgcaacctctgcctcccgggttcaagcgattctcctgcctcatcctcccaagtagctgagattataggcgtgtgccaccacgcctagctaatttttttgtattattagtagagacggggtttcaccatgttggccaggctagtctcgaactcctgacctcaggtgattcacccgtctcctctcaaagtgctgggattatgggtgtgagccactgcacctggccgatttttttttttttttttttgagacagagtctcgctctgtctatctagctggagtgcagtggcaccatcttagctcactgcagcctccgcctccagggttcaagcaattcttctgcctcagcctcccgagtagctgggattacaggcgcaggccaccatccctggctaatttttgtatgtttagtagagatggggtttcaccatgttggccaggctggtctcgaactcctgacctcaagtgatatgcccagcttggcttcccagggtgctgagattacagacgtgagccactgcccagcctgggcattgagataggtcatatgcatagggctcatatatgaggtaaacagttttttcacagaagatgcattagttgatcataccaaaattgggagtatgatacctgaattcataagaataaaattgttaatagaagcattttaataacaaaattgtgtatatttccttttgttgttgttttttgtttttgttttgagatggagtctcgctctgttgcccaggctggagtacagtggtgcaatctcagctcactgcaacctcggagcctcctgggttcaagcgattttcctgcctcagcctctcggatagctggaactacaagtgcatgccactacgcctggctaatttttatatttttagtagtgatgaggtttctccattttggccaggctggtcttgaactcctggcctcaagtgatctgcccacctcggtctcccaaagtgctgggattacaggtgagagccaccatgcctgaccatgtgtatatttctagcgtgaagataggtaatgttcctaggacaatagtagcagttagggcatttattataatagtgtattctgctatgaaaaatagggatagtagacattgaaggccaagactagttctgatttgttttgtgttaagtcaaatggggctcagttagtttctgctagcattgaaatgaatcctactatggccaggggtcatgttggtagaattaattatccaaattcttgtgtgatgataagagttgataaagtgacccgcttatcaagaaaactgttaggagaataatggctaagtcaacttctgtgggattgtctgggctaccgctcggattgtgccaattagtgcatattttgaattggatgctcatcctgatgataaaatagggtagatgcgggaggcagaggttgcaatgagccgaggtcgtgccactgcacgccagcgtggacgacacagcaagactccgtctccaaaaaaaaaagggggggtggtagctggctaaacttgatgtggctagaataaataatactcctatatttatattcagaaatggggtattaagaagtggggtgtagagagagggattcatatgcaagggttaggacgaggtaggtgtgatggtgtaaaggaggatggatggcattagtgattgtggtggttcttttctttgtttctttctccttttctttcttttctcttctctctctctcttttctctctttcatatctctttcattttgagatggagtcttgctctgtctcccaggctggagtgcaatgatgcgatctcggttcactgcaacctccgcctcccaggttaaagcgattctcctgcctcagcctcccgagtagctgggactacaggcgtgcaccccctcgcctggctaattttgtatttttagtagagacggggtttctccatgttggtcaggctggtctcgatctcttgaccttgtgatctgcccacctcagcctcccagagtgctgggattacaggcatgagccactatgcctggctataagaatttacaaaacaaaaatgttacgtctgcttggccttggggcctgtacaagatagattctgaattaattttgacatctgctctaatgcattagttgataaccctttatgggattaatcaatactaggactcaaattatagttatacctgggtatcccactaaatttaagcaagatacccctgataatcttataagttactgaatataaagtggagcacaaattagatattgctcactttaaccaacagaatagtttttttcatgcctaaattctcagttcctcattgtcatagcacttattgccctaaaatattccatagtgagagaaggtctgaaccaatgagtcatgaatttaaatggtcttttaaattaaactttttttttttttttgagacggagtcttgctctgttgcccaggctgcagtgcagtggtgcaatctcggctcactgcaactttcgcctcccgggttcaggcaattctcctacctcagcctcctgagtagctgggattacaggcacccgccaccacgttcagctaatttttgtatttttagtagagacagggtttcaccaggttggtcaggctggtctcaaacccctggcctcgtgatccaccggcctcggcctcccaaagtgctgggattacaggcatgagccaccgcacccggcctaaacttctttatttatttttatattttgtagagacagaatctcactatgttgcccagagtagtctttttgtttgtttgtttgtttgtttgagagagtgtctcgctctgtcgcccaggctggagtgcagtggagcaatcatggctcgctgcagccttgacctcctgggctcaagcaatcctaccgtctcagcctcccaagtagctgggactacaagcacgcaccaccatgcccaactcacttttatatattttgtagagacagaattttgccatgttgcccaggctgacaagtgggcatttctttttttcttctttttttttttttttaaaaataacttttattttaggtttgggggtacatgtgaaggtttgttacattggtgaacttgtgtcatgggggtttgttgtacagattatttcatcacccagatactaagcccagtatccaatagttatgttttctgctcctctccctcctcccaccttccactgtcaagtagaccccattgtgtgttgtttccttctttgtgttcatcagttctcatcatttagctccctcttataagtgagaacgtgcagtatttggttttctgttcctgcattagtttgctaaggataatagcctccagctccattcatgttcctgcaaaagacatgatctcattctttttttatagttgcatagtattccatggtgtatgtgtaccacattttctttgtccaatctgtcattgatgggcatttaggttgattccatgtctgtgctattgtgaatagtgcaagctggcatttctaaaggtaagcagtcttaggagtgttatatgaacttctgtctgcacactaggtagtaggactttgtgatgacaaggtctgcaggtgcattgtaggagaggacttgggtgcttccagtttttcattgtgtgtgttttgtttttgtttttttttttgctttgtttttgtttttttgtttgttttgtgacagggtcttactgtgttgcccaggctgctctcaaactcgtggctctagtgattctctgcctcagcctcctgagtagtcactgtttttattcattaaaatcttgtctagattcaactgtttgcttcatagactgttatgtgatatggtaggtaatatgagaagagagaaaagagtttttctcacaaggtgctgaagcatcttattgcttctttagtgtaccatttctgtcatttcaccaaggtgccttctaccctgtcattagcagtaagatgtgaagtgatcacagcaaaaatgtagaaataatttccatgtctccatgatgctggtgaatttatgagtggctgtgggcagagaatgtcttctgatgacatagtaataaaataaatattttgggatcacagagtcatgtgattatcttacaaattgattatagatccccagccctgtcagtctcacccattttcctctacacatatgtgggatgttttaggactcagtggcctttgaggatgtggcagtgaacttcacccaggaggagtgggctttgctggatccttggcagaaaaaactctacagagatgtgatgctggaaacctataggaacctggcttcagtaggtgatgacgacaacattccttcacttagagaacaagttgcccatcaacgatatttcaagacctggcatgtggaaagggaatacttcagtaaataaaccaagcatggtgacagctaattagatctagaatctaatagtttttctataattaataatgatttccaatgatttttctgggtctgcatcatagggaaaaaatgtgaagagcataacattgaagatcagtccaaaaaccaagaaagaagtctaaggtgagtggcactaataagagttccatgagagagacttagtgtgtcatgaagttttaaaaacaagcaaagaaaacaaataagcccaccttcaaatgtggcttattcttggaaaatttttacccaaagtgtttacttaaatatgacatagatattcagtgtttgaaaagtagttcatttgatagcaatattaagaaactccatttatgaatattactgttttgatattacctgtggttgagccctcttccagaacattcagtctattcatcttcaaacaattcaggcaggactgaagttttaatttctgaaaatggtaaaaaatgtaattcctttacctattaataaatataaaatctttactaaagaaatcattatcatttcttacaaaagtcatgtattgtagacagactgtgtgtgaaaatagatggattagctaatcaaagtgaagaaaacttcagccagatctaaattttaatctgagtatgaaaactcctcctggagtaaatccatgtgaatgcagtgtgtgtggaaaagtcttcatttgtcattcatcccttaataggcacatcagatctcacactggacacaaaccatatgagtgtcaagattatggagaaaagccgtatagatgtaaggaatgtgggaaggccttcagttatttccagtcatttaaaaaacatgaaagaaatcacagtgaagagaaaccctataaatgtaaacaatgtgggaaacccttcagttatcgtcaatctgttcttagacatgaaaggactcacactggagaaaagccctatgaatgtaaaaaatgtggaaaaaccttcagtactcttacaggtttccaaatacatgaaagaactcacactagagagaaaccctatgaatgtaaggaatgtggaaaagcctttatttaccttgcaagctttcaaagacacatgataatgcacagtggagatggaccttataaatgcgaggagtgtggaaaagcattcagttgtcctagttcatttcaagtacctgaacgaattcacactagagaaaaaccatatgaatgtaaacaatgtggtaaagccttcagttggcttggttcctttcgagtacatgaaagaactcacactggagagaaaccctgtgaatgtaacgaatgtgggaaagccttcatttatcgaactacgttaaaaggacacatgaatattcacactggagagaaaccttataaatgtgaacaatgtgagaaagccttcctttctcttgcaagctttcaaatgcacatgataatgcatactggagatgcaccttataaatgtaacgaatgtgggaaagcattcaattgtcttaattcatttcaaatccatgaaaggactcacactggagagaaaccgtatgaatgtaaacaatgtggtaaagccttcagttgttccagttcctttagaatacatgaaagaagtcatagtggagagaaaccccacgtatgtaaacgatgtggtaaagccttcatttggcacaattccttttgaatacatgaaagaacccacactggagagaaaccctatgtatgcaagcagtgtggcaaagctttcatttattgtacaacttttcaaggacacatgagaatgcacactggagagaagccctataaagtgtaaagaatgtggaaaagccttcagtcatcccagttcatttagaagccatgaaaaaatacaccctggcagaaaacttcttgaatgtaagtaaagtgggagttttcaacttgcccacctccttacaaaaacatgcaataagaatgtgctagatataaagcttacaaatgtgagaaatacaggaagtttttcagttttaacaaatactgtcaaagtcatgtgaaaattctcactagaaagaaatccaataaaggcaagttgaggcatacctgtttgttattcaggaatttgctataaggttatactgggggagggggtgccatgtttaaattcaatggtatcttaaggtaaaactgtaatttaagccccagtattgattaaggacatggaaatttgccaactgatgcatttcaacggatgttgaagttaattcggagcctgttttgtagaggtgtgaaacccagtcagcacccatttatttttttgctgttattttaataaactttggatttctaatttgatcaaattatggacctttgtctcaatttttttcttttttcttttggtgattgcagggtgagggagaggggtgttctgtgtaccctacttatatttatatccttcattctctagagagcctcaagtcagtgtcatcatggttatgggcctccctcatggcagtggttgctttagagggtttcaggactgtgggcttaagtctgatttaaattaagggtatctctctgaagtctctattctattcctttgctctgtttttttttttttgtctttctttcttgagacggagtctcgcactgtcacccaggctggagcgcagtggcgcgatcttggctcactgcaacctccgcctcccaggttcaagcgattctccttgcctcagcctgagattacaggtgcccgccaccacgcccggctaatttttttgcagttttaatagagacggggtttcactatgttggccaggctggtcttgaactcctgacctaatgatctgcccaccttggcctcccaaagtgatgggattacaggcgtgagccaccacacccggcctccattgctctatatatctgcctttatgtcatgtcaacaccacactattttgattactgaaacttagagtaagttttgaaactaggaagagtgaggcttccagctttgttgttctctttttcttttcttttcttttttttttttttttttttttgagacagagttttgctcttgttacacagcctggactgcagtggtgtgatctcgggtcactgcaacctctgcctcccaagttcaatctattctcctgccttagcctcctgagtagctgggattacaggcatgtgccaccacacccagctaattttgtgtgtgtgcaatggctcgatctcggctcactgcaacctccgcctccctggttcaagcgattttcctgcctcagcctcccgagtagctgggattacaagcatgggccaccatgcccggcttatttttttgtatttttagtagagatggggtttctccttgttggtaaggctggtctcgaactcccgacctcaggtgatctgcctgcctcagcctcccaaagtgctaggattacaggcatgagcctccgtgcccagccaaaacttagagtaagttttgaaactaggaagagtgaggcttccagctttgttgttgtttttctttttttttttgagacggagttttgctcttgttgcacaggctggagtgcagtggtgtgatctcgggtcactgcaacctccgcctcccaggttcaatcgattctcctgcctcagcctcctgagtagctgggattacaggcatatgccaccacacccaactaattttttgtgtttttagtagagacgaggtttcatcatgttggccaggctggtctcgaactcctgacctcaggtgatccacccaccttggcttcccaaagtccagggattacaggcgtgagtcaccatgtccagcctgttgttctttttcaagattgttttggctatttggggtcctttgagattccctgtgaattttaggatgagtgtttctgtttccagaaaaaaatgtcatgggccttttgataatgattgctttgaatttgtagagcatttgcagtaatatattgacaccttaacaaaattaagtcttttaaattatgaacacagaatgtctttccatttatttatagctttaatttctttcagtaacgttttatagttttcagtatacaagtcttttgcttttttggttaattttttgtcatggcgttttgctgcgttgtccaggttagtctcaaactcctgggctcaagctgttctcccatcttaggatcttcagtagctaggactgcatgtctgtgtcactatagctagctgtttttttgtttttgtttttgttttgagacagggtctcattctgtcactgcactgtagtgcagtggtgaaatcatggctcactgcagtctcaacctcctgggcttaagtggtcctcccatctcagcctcccagtagctgggagtacaggcacaggccagcacgtccagccaattttttttttttttttttttgtagtatgaggtctcactttgttgctcaggcttgtcttgaacttctgggttcaagtgatcctcccaccttgggccttccaaagtgctgattttgcaggtgtgagccactgtgcttggcctgttttattctttttgatgttattactaatgtaattgttttcttaatttccttttcagattattaactgttagtgtattgaaatgtaattttaggctgggtgcagtagctcacacctgtaattccagcactttgggaggctgaggcgggtggatcatgaggtcaggggtttgagaccagcctgaccaacatggtgaaaccccgtctgtactaaaaaatataaaaattatccgggcctggtggtgggcagctataatcccagctactcaggaggctgaggcaggagaatcgcttgaacctgggaggtggaggttgcagtgagccaagatcgcaccattgcactccagcctgggcaacagagcgagactccgtctcaaaaaaaaaatgtaattttaaatgttaattttgtaccctgcaactttgctgaattcatttatgagttcagtttttgtgtacatatatgtgtatgtaatctttaggattttctacacataggattatgtcatctgccaacataattttatttcttccttgcccatttggatgccttttgtttttcttttttttttttttctgagacagagtctcactgagccacccaggctggagtgcagtggtgcagtcttggctcactgcaaccaccgtctcccgggttcaagcaattctcccgtctcagcctcccgagtacctgggattacaggcacccgccatcatgcccaggtaatttttgtattttagtagagacgggttttcatcatgttggacaggctgatcttgaactcctggcctcaggtgatccacccgcctcagcctcctaaagtgctaggattacaggcgtgaaccactgcgcccaactggatgccttttctttttcttacctaattactctgactagctcttccagtactatattgaatggaagtggtgaaagcagttatcctatcttgtttctgatcttaggggaaaagatcaccatgtttatatttcaccattaagtatgatagtcttgtagattcttcatatatggcctattacattgacctagtttcctcccattcctagtttgttgtttatcatcaacgggtcttgaattttgtcagatgccttttgtgtatcaattgagattactgtgatttttccgtcattcggctaatgtggtatattatattgaccgattttcataggatgcactgtttgcattctggagataaatctcacttgatcatggtttagaagtttttaaaaaatacagatgtagtcttgctctgttgcccaggctggagtgcagtggcatgatcataactcactgtagtctccaaactcctgggctcaagcaatcctcccacctcagcttcccaagtagctgggactacaggtgcatgccaccacacctggctgatttttgtatattttgtagacacagggtcttgctatgttgcttttcatatgcctgtttgccatttgtatgtcttcttttgagaaatgtctattcaaatcctttgcctattttttgaccagattattagattttcttcctatagagttgtttgggctctgtatatattgtggttattaaccccttgtcagagaggtagtttgcaaataaatattttctcccactcggtgggttgtatgttcactttattgattgtatcttttgctatgcagaaacttttgtaacttgatgtgataccatttgtccatttttgctttggttgcctgtgcttgtggggtatgcccaataaatctttgcgtagaccagtgtcctggagattttgcccagtgttttcttgtagtagttttatagtttgaggtcttatatctaagtctttaatccatttcaatttttgtatatggtgagaggtagggatctagcttcattcttctgtacatggatatccagttttcccagcaccatttgttgaagagactgcctttccccagtgtatgttcttggcacctttgtcaaaaatgagttcactgtgggtgtattgatttattgttgggttctcttctgttccattggtctatgtgtctcctttcatgccagtaccatgctgttgtggttactatagctctgtagtgtaatttgaagtcaggtaatgtgattcttccagttttgttcttttggtttaggatagttttggctattctgtgtcttttatggtgccatataaattttagggttttttttttctatttctgtgaagaatgtccttggtattttgagagggattgcattgaatctgtagattgctttaggtagtgtggacattttaacactattgattcgtgtaatccatgaacatggaatatctttccattttttggtgtcctcttcaatttctttcctcagtgttttatagtttttattatagagatctttcgcttctttggttaagttggtttcttggtaaaatttaattttacatgtggctgttgtaaatgggattaatttcttatttctttttcacattgttcactgttgacatagaaatgctactagttttgtatgttgattttgtatcttgcaactttactgaatttgtttattcgttctaattgttttcttgtgaattctttaggtttttccaaatataatgtcatataatcagcaaacagataatttgacttcttcctttccaatttggatgccctttgtattttcctcttgtccgattgctctagctgggacttctggtaccatgttcaatgacagtgtgacagtgggcatcctttttgtgttccagatctttcgagaaaacgctttcagttttcccccattcagtatgatactagctatgggtctgtcatatatggttgtgattatgttgaggtatgttccttctatacccacttttttgagggtttttattatgaagggatgttgaattttatcaaatgctttttcaggatcagttgaaatgatcgtatggtttttatccatcattcaggtcatgcaatgtatcacactggttcatctacataggttgatccttgcatcccagagataaatcccacttggtcatgatgaatgctctttctgatgtgttgttgaatttggttggtattttgttgaggatttttacatcaatattcatcagtgatattggcctatagttttgttttttttgatgtgcctttggttttgttatcaaggtaatagtggccttgcagattgagtttggaagtattccctactctgttttttggaatagtttgagtaggattggtattagttctttaaatgtttggtagaattcagcagtgaagccgttgggttctgagtttttctttaccgggagactttttattatggcttcaatcttgttacttgttattggtctgttcaggttttggatttcttcctgattcaatctcagtaggttgtatgtatctaggaattttttacattttttctattttttccaatttattggcatatagttactcatagtagccactactgctttgaatttttgtaatatcgtttgtcttctttttcatttctaatttatctggatcctctttttttcttatttagtctggctaaatgtttgtcaattttgtttaacttaaaaaattgatgttttggccaggcgcagtagctcatgcctgcaatcccagcactttaggaggctgaggtgggcagatcacgaggtgaggagttcaagactagcctggctaacatggtgaaaccctggctgtactgaaaatacaaaaattagctgggtgtggtggcgtgttcctgtaatcccagctactagggagactgaggcaggagaattgcttgaactgggacctgggaggcggagattgcagtgagctgagatcgcaccactgcactccagcctgggctacagagcaagagtccgtctcaaaaaaaaaaaaaatggtcttttgtattttcatttacttctgctctaatctttattatttcttttcttctaccaattttgggtttggtttgcttttgttttctagatcttcaagatgcattgttagattgtttcaagttcttcctcttttttttttttttttttttttttttgagatggagtctcactctgtcaccaggctggagtgcagtggcaggatctcggctcactgcaagctccgcctcccgggttcatgccattctcctgcctcagcctcccgagtagctaggactacaggcacccgccaccacgcccaggtaattttttgtatttttagtagagacggggtttcaccgttttagccaggatggtctcgatctcctgacctcgtgatccacccgcctcggcctcccaaagtgctggggttacaggtgtgagccaccgcgcctggcctcttcctcttttttgatgtaggcatgtagtagctataaacttccctctgagtactgcttttgctgtatcccataggttttggcatgttgtgttgccattatcatttgtttcaagaagttgtcccattttcttaatttcttcattgacccactggtcattcagtagcatattgtttaatttccatgtatctgtatagtttccaaaattcctcattatttatttctagttttattccattgtggtcagagaagatgcttgatattatttcagtatttttttaaatttttaaatttttatttatttatttatttttagacagagtctcgctctgtcaccaggctggagtgcagtggcgcaatctcggctcactgcaaactccgccttccgggttcaagtgatttttctgcctcaacctcccaagtagctgggactaccggtgcatgccaccacacctagctaatttttgtatttttagtagagacagggttgcaccatgttggccaggatggtctcaatctgttgacctcgtgatctgcccaccttggcctcccgaagtgctgggattacagatgtgaaccactgtgcgtggcctttttgaatgttttaaaactcattttgtgaactatatatggcctatccttgagaatgatccatgtgctgaggaaaagaaggtatattctgcagcttttggatgaaatgttctgtaaatatctattagatccatttgatctatagtgcagattaagtctgatgtttcttcattgattttctgtctggaagatctaagtctgaaagtggggtgttgaagtatccagctcttattgtatcagggcctctctctttagctctaataatctttcctttttatatctgtgtgctccagtgttgggtgcatatatatttacaactgttatatcctcttgctgaactgacccctttattattatatagtgaccttctttgtttcttcttaacagtttttgtcttgaaatctattttgtctgatataagtatggcaactactgctcttttttggtttccattagcatggaatatctttttccatccctttattttcagtctgtgtgtgtctttataggtgaagtgtatttcttgtaggcagcagatcaatgggttttggtttttcatccattcagccagtttgtgtctttggattgcagagtttagtccatttatattattgttattgataaataaggacttactcctgccattttgttatttgttttctggttgtttagtggtcttctcttcctcttttcctttcttcctgtcttcctctagtggaggtgattttctctggtgataagattcagtgtctttttattttttgtgtatccattgttttttcggtttaaggttaccatgaagcttgtaaatactatattttaactcattgttttgaactgataacaccatttgcataaacaagcaaaaagaaaataaaaactctacaacttggttcacccccttttaacttttagttgtttctatttatatctaattgtactatgtcttgaaaaattatgtttattatttttgagttgttcactgtttaagtctttctacttaggacaggagtagtttatgggctgggtacggtggtcatgcctgtaatcccagcactttgggaggccgaggtgggtggatcatgaagtcaggagatcgataccatcctgggcaacatggtgaaaccccatctctactaaacatacaaaaattttctgggcatggtggtgtgtgcctgtaatcccagctactcaggaggctgaggcaggagaatcacttaaaccagggagttggaggttgcagtgagctgagatcgtgccactgcactccatcctggcaacagagcgagactctgtctaaaaaaaaaaaaaaaagtagtttacatagcacagttacaatgttacaatattctgtattttcctgtttactattactagtgagttttgaaccttcaggcgattatttattgctcattaatgtccttttctttctgattgaagtgcttcctttagcatttcttgtaggactggtctggtattgatgaaatccctcagcttttatctgggaaagtctttatttcttcttcatgcttgaaggatattttcaccagatatactcttctagggtaaaagttttttccttcagcgctttaaatatgtattgccactctctggtggcctgtaaggtttccactgaaaagtctgctgccagatgtattggagctccattgtatgttattgtttcttttctcttgttgctttttaggatcctttctttatccctgaactttgggagtttgattatgaaatgccttgaggtagtcttctttgagttaaatctgcttggtggtttataacctttttgtacttggatactgatacatatctctagtttgggaagttctctgatatcactttgaataaactttctacaaccttttttctacttcctctttaattaaatcttagatttgcccttttgaggctatcttctagatcctgtagatgtgcttgtttcttactcatttttcttgtctcctgactgtatatttccaaatagcctgtcttcaagctaattctttcttgtttgatcaattctgctactaaaggagtctgatacattctttagtaagccagttgcatttttcagctccagaatttctgctcaatttttaattatttcaatttctatgttaaatttatctaatagaattctgaattccttttctgtgttcccttgaatttctttaagtttcttcaacacagctattttgaattctgtctgaaagatcacatatctgtttctccaggattggtcccctggtgccttatttagttcatttggtgaggttatgttttcctggatggtgttaatggtagtagatgttctttggtgtcttggcattgaagggttaggtatttattttggtcttcactgtctgggcttatttgtagctgtccttcttagggaacgctttctagatatctaagttatatctgctttagggggcaccccaaacccagtatgctgtggttcttgcatactcatagaggtgctgccttgatggtcttggacaaaatctgggagaattctctggattaccaggcagagactcttggtctctttccttatgatctcccaaacatagtttctttctctctctgttctaagccacccaaggctgagggtggaatgacaccagcatccctgtggccaccaccactgtgactgcactgggtcagacctgaagccagcgctgcgtcttgcccaaggcctgctgtaaccactccctggctactgcctgtgttcactgaaggcccctggggtctacaatcagcagatggcaaaaccagccaggcctgtgtccttcctttcagggtgacgaggtcccctaagccccaggtgagtccagaagtgctgtccagtagtcagggattagagtgaaaaaaaccttagaagtctgccttgtgtcctgttgtattgtggcttggctgagctggcactcaaactacacaagtccttccctcgaaaggcagaggaacctcaccccatagccaccgccccaagccacaaggagttctgtcagagtactgctactgctcatgttcccttagggctaaaggtctcttaagtcagcttgtcatgaatgctgcctcttcagggcagtgggctcccctctagcccaggacaggtccagaaatgctatcgaagaatcaagttctagaatcaggggccccaagaacctgcttggtgctctgcccctctgtggccatgctggtgcctaaggtgcaagacaaggtccccttacttttccctctgcttttctcaagcagaaggagttttcctctgtagccaccacaactggttatgtgctgagtctcacctgaagccagcaagtctcagaggctcaccaaaggcccttcatgtagtgcctgggtatcgttactggttattcagggtccaagggctcttcagttaacaggtgattgctggcaggactgggtccttcccttcaaggcggtaggttcccttctggcccaaggtgtgtctagaaatgtccgcgagctaggccctggaacaggggcctcctgattctgaccagtgccctgtcctactgtggctgggctggtatccgagatgtaagatacagtccccccaatactgtctcctccctcaagtagaaggggtctcttttttagctgacagctgtgcagcctggggttaaaggaggggtgatcccatatgtcaccacccctccctgccccctgtcggttcactgactctgggcctaattcagcactaggactcacctaagagttgcagtcctcatgggctagactgcctttcaactttacttggagagagagagtgctgcagccctcagcaatgcggtttgcaggtgcttaagttcagaccactgggatcagcagttcctccctggctaaggctggttaagtgcccctccgtgggcaggtatcagctgaatttggtctgattttcctttctgctctaacaggacagcactgagttcagtgcctcacaattgctgtgttctccctcccacagcacctagacttgctctctgcatgatgctgctgttgctgggggtgggagaggggtgctgttggtgattcaggactgttttttaaatcgcttcattgcctctttcagcgatatgaagttaaaaccaggtactataagtgcttacctgatttttggttctcatgaaggtgttttttctgtgtgatagttgttaatttggtgtccttgcaggaggatgatcaggggagctttctattccgccatcttgctctgtccctttctatagtttaaaatatttgaggtatgttagggaaggtctcatcttgtttttcagaaagcaaaactgtttttattcattattcctataacatttggtgaatatgtatcactacacacctcagaatggctaaattccaaaatataacaccaaatgcttccaaagatgcaaacaaaggaacattcatttctgtggtaattcaaatggcagaggttgcagtgagccgagattgcgccactgcactccagcctgggtaacagagcaagacgctgtctcaaaaaaaaaaaaaaaaaaatcacaaagtgatcccatttcacacaaactacaaactagataggcaaaaatacattattccacgactggcaacactagaattatctaaatatacatgcaagagtggtgggacggtcaattcatgtactccattgggacttggtggcaatcttaaagttgctcagaatctacaacccagcaagttttctctaatgtatagagaatttactgtgcacaggcacatggggacttaaagtatgattagagcagcattttccataagaacaaaacacaaaattgaagcaacatgaatcctatagatactggaatggatgagcaaattgggtagcccaagcctcagacaccagcatgtgtgaaacaactgggacaaaaaccaaggagacgcccatccatgatttccttccacagaaagtgctaaagaggcaaacttaagcaaaacactgcttggtgataaaataatggcatagccataaagaatatccacaaaattaagggcagtggtcacctctggggacaagagggaaacaaagtcaaggtggagcagcactgggagctgtgacatgcccagggtctgttcattctgagtgcccagtctacggaagtttacagttatgattaaacataaaacattctacgcattctataagaagtatgctatatttcactataaaaatataattcagctgagtgtggtggctcacgcctgtaatcccagcactttgggaggccaaggcaggaggatcatttgaggccaggagttcaagaccagtctgggcaacatagtgagacctccatctctaccaaaaaaataattctttaagtttgaaaaataactttcaaatatttattttgccatgttttctaactaccttcccagttctcatttcactgccttagttcagtacagatttctaagtcttttagattgtacctattgctattcatcttgattacagcaagaaatgactagcaaaagaatgggaacatattcagtgtttaatagagaactgactatataaacttccatcttttaaaaaaatatatttattaaaacattttttggggggagacagggtctcactctgttgcccacgctggaagtatagtggcacatagttcactgcagccttgaagtcctgggttcaagtgatcctcccacctcagcctcccaaggaactgggactacaggcatgtgagccacacaactggctcaacttctatcatcttgtgaacctttataaaaattagggaaggcaccaatgaatatgaaaaagctgcaggatttattttcaaatgaacaaaaaagcaaagtgtgtaaaccatgttgccttttatagtgaggaaagaaaaatatgtaatttaaattgctttttatgtaaatgccggacaagaaagtaataaaattgttatctttgggaacctgaggccactagacacgaatgctagaggacatgctaagagtgagccttcaggtagactgcttctaaatctcaggctgggttttgggtgggtgggtgtgtgtgtgtacacacagggttttttgttttttttttttttttgtagagacaaggtcttgccatgtttcccaggttggtcttgaagtggcctcaggtgatcctttggcctcaccctcccaaacagatgtgagtcactgtgcccagcctcaggctgaatttttgaatcttaacattgactataaacaatgattaagaaaatttgcattaagtatattttaatagttcataaatcaaatgactaatttttaacaggtaactagttctttgtgttttatggtcctctaaagaagttttatgaagtgagcagtatgtttttgtaaaccataaaaagttgttatgcacataaagatgggagcaatggacgctggggactgctggaagggggagggatggtggagagtgagggctgagggaatgcctgttgggtgctgtgctcactgccaggatgacaggctcacccatagcccaaacctcagtgtcacagtgtgcccatgtgacagacctgcatatgtaccccctgaatctaaaagttgaaattattaagaaggtaaattgaaatgtattttttttgtgatatgattcctgatgtttgtgagatgtgggtttgtgtattccatcccaggaatctttaaaaaataaacgttaacaaaaaaatttttttatcacttgagctcagaagttcgagaccagccagggcaacatagcaaaaccccatctctataaaaatttttaaaattagccaggtgtggtggcatgtgcctgtagtcccagctacttaggaggctgaggtgggaggatggcttagagcttgggaggcagaggttgcagtgagctgagattgtgccactgcactccagcttgggcaatagagcgagacatgtctcaaaaaaaagaaatgaaaaaaataattttaaacatttggttcttaaattacaagtgatattacaggttgcactgccatcacatatagggcattttttgatctgggcagaatcttaaggcattaggatggcgtaacagtatgaggagcttcactaacccactccccagagacacttatgacagttactttaaaacaaccatttaaagcccctgaagtcatcctaaaggcaaacagccagtgaggaaacctattcaagagaatctgtgaaaattctgtgagaaatgtgagtttgtggtatttaaacccttactgttccctgatcctgtaccccacatcctcaccccagtgaggtgaacactccactctagactgtgtagccaaggatacaaggttctctctttctagtgtaagagttagagttaaagaggaaagaggctgggcgcagtggctcacacctgtaatcctagcactttgggaggccaaggcaggcagactgcctgagctcaggagatcgaggccggcctgggcaacatggtgataccgtttctactaaaacacaaaaaattagccaggcatggcagcctgcgcctgtaatcccagctactcagaaggctgagacaggcgaatcacttgaacccaggaggtggagcttgcagtgagctgagatcacgccactgcactccagcttgggcaacagagcaagactccgtcttaaaaaaaaattaaattaaaaaaaagaggaaagaaacaccgaacactgcttgacagtcaaagacaggtttattatagaaaagacctgagagaggattctggctggtcagtcaggagcacttttccttgcagactaagaatgtacgttggttttagggtgagggagcttattacaagcttggaatgtttctgtgtgggggagaagtttgtggcagggttggaatgttctgggcggaggggtggttatcttgggggtgacatctttccggcaggagaggggttatcccgaggctagcatttctctgtgggaggtgtctggaatgtttttggttggagatgttatttgtggtttgtgatcatgctgaccttagccattaggctgatgccctttggatttaggcagtttttgattaaggtgaattttaaaatgaggcgcttatccacaatggtgatgcttctgctctgtcaatccagacctcatagttataaaaaggacgaggggcggcatgttctttctggctacttcctgctgacgaggggacagagagttctctggtatcgggttggtaggagcagtgccgtctgtagatatttttgggtagttgtctgtgaaatggccatgatcctgtcagtttaaaaaatctctgaaaaaggttaattaggcagggtaagaacattagtcccataattaggtatattattaggagagggcccaggaatgggatgacccatgctatctatgattttgttcccaaaccaagaatctgtttgtttgttttggtactccttagctttttagcttgttttttttaatagcgctttttactaggtctgattggctgatatagaaacaacattcctttcctaataagaggcagaggtgctggtttggaaaggcccatgtgttattttctgttagtaaccattattcccgctatgaggataataattaagcgaaatgctatggtaattgagattctgtgtctgatattttaccctgagggtgctacagtatatagtcctactgcaaatagtagagtgagtaaagcaattcccacacgggtggcgtagtaaataatttccattaaaaagttttaatatttggcttaaaaggagaggtaggaacgataaaagtatttgatgaggtaggggtgagactgaataggatgagtaattctctcttggttacttattttagcttaaggtttcctatttatttcctccggtgagagtcgggggcttagaggcagcgcctgctgaaacatcaagttttcagtttatagggctttcagaaagcacagctattttggaaacttgtagccagaaaaattagaatttaatttaaacagaaaatagtaagaattgaaaaacattaggcaacaccaggatttaacaacatgtgtgctatcgtttttgaaacataattttctctctcaagtttaccattttcattaaaagacaaatcataccagtaggactgattttctttattatacttggcttagttatttgcatacagtggagcaagaataattatttgttacttaggtcctttaaattggctttgatggaactttgttttgtagaaggaatgtgagataagacctttttaaaggcaaggccagccatagatttgtaccactgaatacctatgagttgggagaaatcctctcttcttgaggttctaagataacttgggactcctggcctgtcagaaagtgacattctttacttaccacagatcggaaaccctgtacagggactgtacatgaaatctgaggccagctttccaagggctttattggctccataagtcaaatttgattccttaaaggaaggcacaccattccagttaaagccttggtaaaataaccagttttcccaattgtgtcctgttacaaaagaaaacagattcttgttgcacttatgcaaataactatattaccctaacttaagaatacatacagatagtttccaaattctggagaaaatcaggtagagagaaacaagaatgctccaaattttgttcatggaagcatactaaattgttaaaagctgtcaataattcaaaagaaaagattcttggactttgaaaagcaaaacaaagaattagcaatattttaagcaatacgttaaaaagatcactccaggctgggcgtggtgggtcccatctgtaatcccagcactttgggaggccaaggtgggtggattacctgaggtcaggagttaaagaccagctgggtaacatggggaaaccacatctctactgaaaatacaaaaattagccgggtgtggtggcgaacgcctgtaatcccagctacttgggaagctgacacaggagaatcgcttgaatgtaggaggaggctgcagtgagccgagatcatgccactgcattccagcttgggctacagagcaagactctgtcttaaaaacaaacaaacaaaaaagatcactccagtctcctgcagtttagttcatgcagttaattcctgtcctgattcatattaacattttagctttttaagagttctgaacgtttttcctctattgtgatatcacaattttcagaaacttgcattcaagggcacctgttagacctttatagctgattataaaaccacctttttaaagaggaccaaaacaagacaacaattgtttatggatgacagaaagttttaggataggccgggcgtggtggctgatgcctgtaatcccagcagtttgggaggccaaggcaggcagatcaccttgaggtcaggagtttcagaccagcctcaccaacatggtgaaacttcgtctctactaaaaatacaaaaattagccaggtgtggtggtgtgcacctgtatgtaatcccagctactctggaggctgaggcaagagaattgcttgaacccaggaggcagaggttgcagtgagccaagatcgtgccattgcactccagcctgggcaacaaaagtgaaaatccgtctcagaaaaaaagttttagaatagccatacttaaagacgcaattgacaaggatatctgttacctttgtggcacacaataattttaacataacaattataattattacttataaggtacactaagatatgtcagaattataggagtctcccataactttgaaacacataccaataacatacttatacaaatatagcccaaagaaagccaaacaccattttgtatttgacaatgcttcctgtatgattttataccaaatatgccaaattttaccattatagtagtgtgctatgaatattaaactccatttttaataaaaccttgtagatgcatttactcaattttaatgtttgaccataaggtaagatttttatagaccctttttaaccctttataatttttgttaaaaagcaggttagtgcttaagagaaacccgttgtgtttttattttaatgctcaatttacagaaaaactagatgctaccccttcaactttagccaatatgtttacacagaatttcctttacaattaacctgccaaaacgtgcttaaaccttcaaaacaattgtttaacttaacttttttaaaccttcaaaacaattgtttaactttttaatgtaggtaaaaatccacattctcatgcctccttataatctttttaccaaaagtgtattttactttccttacacactttccacataattaactttcagtaaagtttacttttgttgaaaaccttggtaagtttgggattttaattatgtactaggtgtagagcctaggacctagacttctgtgcagataaggtctggcttagtccagcatttaattccgtgtgtcctaggttttacctagctgcaaagcaggcaagttgtacaggtaagagttataggggcattttataaagcagtcaggaggcctaatcacttttaaattgtacatttcttgcataaattccatttataaaatttttcatgcctttcacagtctgacatgcctcaactttctgacttgttgtaaacatctctctctttaaacaaccagttaatttactttagtacaaaaatttaccatataaaatttttaaatataaattatcttttaatataaaagataccagtcctttcccaaaacaaacttccttcatgcctgtggactagactgcctaagtccataagattagaagttaggatattaaatggcttaggatgtagctattttcattaaaccaatattaatgtttcacttattaaaaaattatacaaagattattttgtttgggctgagtcatagttttgtttgttttgataccttatagtatttggcagagataagaatgaaattgcttgattaataaatgcaaacaaaaacatatgctggtaactcttaagacagttctaactttactgtaccagtaagttttaaagattaaagtcatgtgaactgaaagatcccacagcttttacttttcccttaaaaatatttgatttaagcacttattttttttgccaattataattagagttcctttaatagacattgcacacataacacatatataaccacacagacaaccagaagaagattcagtagttacaatattttttttctcctaatttcccaattggcttattggcctttgggtggtgccctttaagaacagggctaggaaaacagtttccagggcctaataaacaagtagagctggaagacaaagattttgagaggtacttattcacctttaattccaggggttccataaggaaaacagatttttcccaaaatgggatttgtggtgccttttctgttttcccaagggatcccaggccaccagaaaccgttttaggattttatacatgcaccaagagtggcaagacagagtggaaaaaagtaattcagttaactgggaaaaaaccttttccaggaaaacaagatctatgaagagaagccttttgaatatactcatagcttggaggagggaaagacctggagagggttttcattaggaagaaagatattttttttttttttgagactttgtcttgctctgtcacccaggctggagtgtagtggcgtgatctctgctcactgcaagctctgcctcccaggttcacgccattcttctgcctcagcctcccaagtactgggactacaggtgcccgccagcacacccggctaattttttgtatttttagtagagatggagtttcaccgtgttagccaggatggtctcgatctcctgacatcgtgatcagcccgcctcagcctcccaaagtgctgggattatagacgtgagccaccacgctcagccaggaagaaagatttaggaagaaagattttatgagaggtgcaaacttgacacagggagcgttgggatttaaagtagaagcagaaagcctgaatatagagaacctcttgccatttgctgttcttggttataaagttgttaaggttcctgagaatttgcaagctaaaggtgccatttttgggccatcagctgtcattatctaatgtgtattggggccaggccatgttacaataaaagactacatgcttaagccaagtttggcgaggttgtgaaggagacagcacagtggagagggtgtgggaatgtgggattgtttggcacccatgtggactggcaagaagaagccgagggtgtctgtttttgttctaggcgtccccagacaaaagacagagacctggagttctctttctaaagaggatggtcaagctgagaagaaactgggcatccccaagatttcctctagcttagtcccactggtcctctgaggaccgagatggcagacctgactttttccagataccatgagaaagccaggggagggcagatcttaccagtcagctggattagtgtctgatgttaacgttccagttggcctcttgggctgcagctgcacaagggagagagagaaaagggaggattagagaaaagtgaactgaataaaaagacaacgagtggtggccagagacctccaggatccaggaattaactcaggacaagctgctgttgcccactgcttcctgggttgcaggagagcctctgcccccagcacccatcctgggtttcggcaccaaatgtaagagttagaggaaagaaacacgaaatgcagcttgacagtcaaagacaggtttattttagaaaaaacctgagaggggcttctggctgatttctgtcagaagtgctttctcttacagactaagagtgtatattggttttagggtgagggggcttattacaagcttggaatgtttctgtgtaggggagaagtttatgggggcgttggaatgtctctgggcagaggtggattatcttggggctagcatgtctctggtctgggaggagttggaatgtttctggttggagatgttatttgtggtttatgatcatgctgacttagccattaggctgatgccctttggatttaggcagtttttgattaaggtgacttttaaaatgaggtgcttgtccacgatggtgatgcttctactcggtcacccagcctctagtcaaaggcttttttccaggaagggcagaacttcagcttttctcatcttacctccacctacccattactgaggttatgtcctgtgtgggtatgtttgaaaagtggggacatggtttgtgagtatggtgcactcagactactaggacactgatcaactttgcctcagctcgtagaggtggtggatccatgccaggacacaggccaagaggacatcaggctgctgtccctccccgccactgaacactcagttcctaaagagagaggattactcagaaagcagcttgccaacgctcctacccaagcttcagagccctgtcagattttgccttgaggtggaagagaagcaagctgtgaaacacatagctcctaacctcttgcctaagaattaacttcaattgcaacagatcatgagacatttaagtcaaagggcactccatccttgatgcagtggaaatggggaaatggaggtgaaagacaattcacaggagatttgtggatttaatgaagatactgcctgcactgtaggccagctaatttgtggacaaaaccaggaaaaaaacactgttaggaggagtccattaagcatctaaacaaacaactattaaacgctgatctcagatagtattgttagaaaggagagaaaacatatttggatttacagggcaaatttgtccctggacttttttgagaacaatagagctatctgaaggggtgggttgcccctccacacctgtgggtgtttctcgttaggtggaacaagagacttggaaaagaaaaagacacaaagtatagagaaagaaatagggagacccagggaaccagagttcagcatatggaggatcccgccagcctctgagttcccttagtatttattgatcatttgtgggtgtttctccaagagggggatgtgtcagcgtcacaagacaatagtggggagagggtcagcagacaaatacgtgaacaaaggtctttgcatcatagtaaagaatcaagtgctgtgcttttagatatgcatacacataaacatctcaatgctttacaaagcagtattgctgcccgcatgtcccacctccagccttaaggcggtttttccctatctcagtagctagaacgtacaatcgggttttataccgagacattccattgcccagggacaggcaggagacagatgccttcctcttgtctcaactgcaagaggcatgccttcctcttttactaatcctcctcagcacagaccctttacgggtgtcgggctgggggacagtcaggtctttcccttcccacgaggccatatttcagactatcacatggggagaaaccttggacaatacctggctttcctaggcagaggtccctgcggccttccgcagtgtttgtgtccctgggtacttgagattagggagtggtgatgactcttaacgagcatgctgccttcaagcatctgtttaacaaagcacatcttgcaccccccttaatccatttaaccctgagttgacacagcacatgttccagagagcagggggttgggactaacgttatagattaacagaatctcaaggcagaagaatttttcttagtacagaacaaaatggagtctcctatgtctacttctttctacacagacacagcaacaatctgatctctcttgcttttccccacaccatcagccagcaatcagtgcagtttaacatctgagggctgtccaagagaggaagagattcccacagtaccattgtcatgccaggatgactgcaggcagaaacaaagctgagccacttcccctcccctcaagagcaatatcagagacttaaagttatgaagaagaaattgacagagcaagagcatcgccatcgtggacaagcacctcattttaaaattcaccttaatcaaaaactctaaatccaaagggcatcagcctaatggctaaggtcagcatgaccataaaccacaaataatatctctgaccaaaaacattccagactcctccctgaccagagacatgcaccaagataaccctcactctggctgggaagatgccagccctgagaaacccccctccggccagaaagatgtctgccccaaaataacctcccctctgcccagagacattccaagcttgtaataagccccctcaccctaaaaccaatatatactcttagtctgtaagaaaaagtgctcctgaccaaaataggccagaagcccttcagattgtttctaaaataaacctgtctttaaccatcaagctgtgtttctttcctctttaactcttacagaaatagacttcaccaaaatagtccaatcggtctctaaacaaaacaaagcaaataacaataacaaggcccggagaaattgaacatacttgagaaggttcagtatgttatcaaaaatgtccaatttgcaacaagtacaacccatacatcaaaaaaaaaaaaaaaaaaaaaacctgacaatagaaactgcctgtgagaacagatagcaaatttaatcgaaaaatacttcaaagtgtacattataaatatgttcacagaaccaaagaagagcatgacttaaacacattgaaatttggaatctagctgaaggtttctccacaccaactaccctactttcacaatctttctaatgtaatgactactgtaaaaaatgacaagcctggctgggcgcagtggctcacacctgtaatcccagcactttgggagaccgaggcaggtggatcatgaggtcaggagttcgagaccagcctgaccaacatgataaaaccctgtctctactaaaaatacaaaaattagccgggcatggtggcgggcacctgtaatcccagctacgcaggaggttgaggcaggagaatcgcttgaacccaagaggcggaggttgcagtgagctgagatcgcgctgctgcactccagcctgggggacagagtgagactctgtcttaaaaaaaaaaaaaaaaatgacaagcccattattagtggttcattaataggttttgaacgtacattgctaccagtatcacagaaagtgcaggttttctgccatgtatgaattgtttgaaagtaaatgcactgattactctgcaacaaggctcccccatagctattataaaaataataacatccatgtatgaagtttcttagttctgtttccctgtgaagtatgttataaatacttcaacatctatgttacagtaagtatattatttgtgttgaaaattttgttttaaaaattgataacatgcaaagatcccctcaagggattttcctcttgtgagggcaaatcaccttagatttctcccaggctttttctattgatctttaatgttctggttgtgccatttgtttcctaaaatgtagaccgagaaaaatcattatcatttagaaagcatggaaaaattactggattgtaggttcattgtgcactgcagccatgcttgatcaattcatcaaaatacctcctttccacattccaaattttggaacagcactgatggccaaaaagcacttgttctctaattgactaaaggaaaaaaatagtatcctcacctatagaagccaggtgctgatggcttccctcatcacatctctacagattcttcacggaaaaatccagcaaagcctactccttctggatgaagttcagagtcacatcttcaaagaccaccaagccgtgacatatcccagatatgtgtagaggaggacaggtgagacggacagcactggggatctagactcaattcatgagagttcacactgaagcggtgtcattgtctcggagccatggaaaactaggacatggacaaacagaggttctgagcagaagtttaataggcgaaagaaagacatgagctctctctgctgcagagagaagggtctcagagaagtgggttgctgttcccacagtgaaatgcagttttatagatgagcttgaggaggcagtgtctgatttacacagggtacaaaagattggttggggccgggcgtggtggctcatgcctgtaatcccaacactttggggggcagaggcgggcggatcacaaggtcaggagacatcctggctaacagggtgaaaccccatctctactaaaaatacaaaaaattagccgggcgtggtagcaggcgcctgtagtcccagctactcgggaggctgaggcaggagaatggcgtgaacctgggaggcggagcttgcagtgagccgagatcgcgccactgcagtccgacctgggcgaaagagcgagactccgtctcgtctcgaaaaaaacaaaacaaaacaaaaaaaccgacaccagttcactacaatctttctataaaatacaagagtaaacacttcctaatacatgctaggaggccaacagaatcctactgccaaaactagatagatacattacaaaggtggaaaactatagaccagtaactctcatgatcatagatcctaaaagttctcaacaaatattcacaaattgaatctaaaaatgtataaaaagaattatacaccacagtcaagtgggaatcattacaggtgtacaaggctgattcaaaattcagaaattgccaggtgcggtggctcatgcctgtaatcccagcactttgagaggctgaaaagattgcttgagcccagcaggcagaggttgtcctctgggagtgaaccagaggctgatattcactagatcctccaagatacctggcaactgtgagtatcctgggtcaaccccaggaagttctaaaacccaggaacagggacagatcaccctataaaatttccaaaagggaacctcaatccaaagacattctggtaaggtgtctgtgcctagggaagataaaaggaggagaggcacaaaagagtaagtgcacccgagtttcatgcacttactctgttttcctcatgtgaaatgttcacaaacagaaaaatattttaaaaagagctatcgctctgtgaaaaaaatgataaagtactgcatctgtttgaaatgtacaataaaggacaaatagttgataatattttgaatcgatgaagcaaagttggcacttgggaatgtggggaaggaattggaaatttaggaattcatacaaaccctagaagggttaagttcggcaaacagaattgtggatttgagacctgcgtcccacacttttggaaaatgcaagggcaaacaaatacacgagaaaatcggtacccctggggagtgttaaaagaaataagaggcaatcagactggaatggctatagtgccctgagttgcttcccaaggacaccaaaatcggacacaaatgtagcttgtaaattaccaatttagaggaaaatgaagtttagcctccgactacataaccagaacatttccacctggatagacctgtcagaaataggaagaactgaaagaaatttgttaaaaagtggcctaagatggctgcaggttggacatacaggtaatagaaaccaggcccatgaaataaaactgaactctcagcctgcaagttaaatatttcactgacctgtactgatgacaaccttgcctatcagatgaagcgaaggtaggacagattcaatcatccctgtctaaaccctgcgatgcctgtgtactggttaacctttcatatactttcaccacatacttgctttatcttataaggtcactgcccacctctcccattttctgtgtaacacaaggtataacacttcacgtagcccactccaggacacattgtttgtgctgggtctgcattcccaggctattgtccttaaacttgacttagaataaaacgcctgtttttttaacctttggttgacagaccaaataaggcgacttataaccaaagatttaacttggcttgcttcctcatacaccttataaaagcctttccttcaagcccccctgacgggaccccaaagaacaagccatggttgggttattcatgaattgctcttggctaaatagttaaatatttaacggtgctgcattttaatttttacaggtgaaaggcaggattgggaaccccacagaccgcagctcctcccaggagaaccccacacatgagtctggatcctcgccatgatcctcccgtggcccccacacaatctggggagacgcggggccgcgggcactgcgctgccgagagggctccggactgaggctgcagttgctgcgcagggacggctcaggatgcccggggtcccggctgctggcccagccccaccctgtggccgaggggacccagggacgagctgcgccagggagactcgggtccgcagaccccggaatcgctgctgacaggcccgggtcccaccacagcaggtcccaaccagcccctcctcccacccggccttgcacactcaccatttcccggctcccaggtgtcccgggtcctcccttggctccggagatcagtgctggtcaccaccggacagaagctgtggtggagccacctcggcctctggaaggctgaattcagtgggttaggggaacaggagccccttagacttgcggagcttggccccaccctcctggcggagcgcctgattggataatttacacgaccccgcccagtacccctaggataggaatcaagccccaccccctaggcccgggtttcaggagaagccacggaaaactcggaagtgtggagcaggattgacaggttctagcaacagccctcccacccccccgcccaggccaggcttccttctggagcttggacgtgaccccacactggggacatttgcatttaagaaaaacttggctccaggctttccacagtgggccctggcatcttcctatactcactgggccctttctgtttcttccttctggacgggggttcacaagtgtgagcaggcagttccacactccgtgtccaattgagccagtacctttgctggaagctactgggctggaacaggagggagagcccagatgtcttccagggatcaggaatttgggataagcggctggtggcatggccaaggcttcctcataccttatctcagtctacccattttcagggaagaaaatgaaatatgccaacaagggaacaaaaattaagtgcatggaaaaaagttatactacagcaatattctgtaaagaaatcaaaaggggccgggcgcgatggctcaccctataatcccagcactttgggaggccaaggtaggaggatcacctgaggtcaggagtttgagaccgctctggccaacatggtgaaaccccattctctactaaaaatacaaaaactaggccaggcgcggtagctcacgcctgtaatcctagcactttgggaggccaaggcgggcggaccacaaggtcaagagatcaagactatcctggccaacatggtgaaaccctgtctctactaaaaataccaaaaaaatcagctgggcgtggtggcacgtgcctgtagtcagagcagctcgggaggttgaggcagtagaattgcctgaacccgggagacagaggttgcagtgagccaagatcacaccactgcactccagcctggcaacagagagagactgtctcaaaaaaaaaaaaaaaaaaaaaaatagctgggcatggtggcacgtgcctgtaatcccagctactcaggaggtcgaggcaggacaatcacttgaactcgggaggcggaggttgcagtgagccgagatcgtgccactgcactccagcctgggcagcagagtaagacttcatttcaaaaaatgggaagaacagcaaacattttaactagctcagataagcatcctccttcacaaggaaaagccgcattcagaaaatgaatcacgttcccaaccttaagagccaggttctgactgctgtaacgcagccccagaggggatcagtctgtgagttcctgtcccctcagtgtggaaatgctccctccttcaggaccttaattttcaccagcaggaaactctcacctggaatcagcttaaggttctgatctaaataaactgtcaaaatcataaacccattctccagaagacaacccaaacaagtctttctctaaacctgaactaaacagatttttttagagggagtctagctctgttgcccaggctggagtgcagtggcgtgatctcggctcactgcagcccccacctcccgggttcaagcagttctcctgcctcagcctccccgagcagctgtgactataggtgcacaccaccatgcccagctaatttttgtatttttagtatagacggggtttcaccatgttgaccaggctcgtcttgaactcctgacctcaggtggtctgcctgccttggcctcccaaagtgctgggattacgggagtgagcgactgcacctggcctttttttttttttttttttttaaacaagatgggggtctcactatgttgctgaggctggtctcgaagtcctgccctcaagtgatcctcctgcctcagcctcccaaaatgctgggcttataggtgtgagccaccgagcaagcccagcccaagttgcatttttttttttttttttttttttttgagatagagtctaactctgtcatccaggctggagtgcagtggcgtggtgtcactcactgcaacctccacctccctgttcaagcgattctcctgcctcagcctcctgagtagctgagactacaggcgcatgccaccacacgcagctaatttttgtatttttagtagagatggggtttcactatgttggccaagctggtcttggaactcctgacctcgtgctccacccgccttggcttcccaaagtgctgggattacaggtgtgagctaccgtgcccagccccaagttgcgtttttatatagtaacaataaacggtctgaaagaaaattaatgaaacaattccatttacaaaagcaccaaaaacagtaaaaattcagccaagaggcctgtatcttgtacactgaacactacaaaagattgctgaaacaaattaaagaacagacaaataaatcgcaagtaatcccatgttcatggattgtaagacttcctattgttaggatgagcatactacccaaattaatctacagatacaatgcaacccctatcaaaatccttatggccttctttttaggccgggcacaatggctcacacctgtaatcccagcactttgggaggctgaggcaggcagatcacttgaggtcaagagttcaagaccagcatggccaacacggtgaaaccccgtctctactaaaaatacaaaaaattagccgggtgtggtggctcgtgcctgtaattccagctactcaggaggctgaggcaggagaattacttgaacccaggagatggagggtgcagtgcactgagattgtgccactacactccagcctgggagacagagtgagattctatctcaaaaaaaaaaaaaaaaaaactagaaaaaatcaaccctaacgttcatttggaatctcccctaataccaaaacaatcttgaaaaaaagttcaaagactcacgcttcctgatttcaaactggctataaaactaccatcatcgaaaccacatggtactgtgtagggacagacatacagaacacagatcctagaaagaaaatgcttgcatatgtggtcaaatgattttttgacaacagtgccatgatcattcaatggagaaaggatggtctttaaacatatgttgttgggaaaactgggtatctacattctaaagaataaagttggacccttaccttatatacaaaaattaattttgagtcaaagatctaaacttaaaagccaaaaccatagaagacttagaagaagatataggagaaattttcatgacattggatttaacaatcatttcttggatatgaaatctaaagcacaggcaaacaaaagataaactgaactacatgaaaatttaaaacttttgtgcaccaaaagacaacatacagaatgagaacatatttgcaaatcacgtatcttggaagagattaatacccaaaatacataggaactcctacaactcaacaaaacaaaccaatgagcccattcaaaaatgagtgagggacttgaaaacatttgtacaaagatatataaatggccaacaaccacatggaataatgctcattaccactggtgattagggaaatgtaaatcaaaacaccagtgacagttcacaactgttggaatggctgccatttaaaacaaaaagtagaatataaccagggttggtgagcatgcatagaaactgcagtccttgtgtattgctggggagaattttacacacagccactgtgaaaaacagtatggctatacatgaacatagaaaaccctgtgacccagcaattccactcctaggtatgtatctaaaagaatagaggccaggcacggtggctcacacttgtaatcccagtactctgggaggccaaagtgggtggatcaccagaggtcaggagtccaagaccagccttcctggccaacatggtgaaaccctgtctctactaaaaatacaaaaagttagctgggcatagtggcagacacctgtaatcacagccactcaggaggctgagacaggagaaacacttgaacctgggaggtggaggtttcagtgagccaagatcgcaccactgcactccagcctgggcaacagagcgagactccgttgcaatcaatcaaccatggaaagcagggactcagacacatacgcactgattttagagcagtattcagagtagtcaaaagagttttgtggaaacaacccaagtgctcaacatatggatggataaacaaagtgtggtgtatccaatataccacacttgggaatattattcaggcacaaaaactgaattactggtacatgctaacatgtggatgaaccttgaaaacattatgctaagtgaaataagccagacacataaggacaaatactgcatgcttctacttacatgacgcacctagaatcagcaaattcatagagcaagaaaggaaaatagagattaccaagggatggggatgggaggaatagggaatggttgtttaatgggtaccaatttttttttggactaatgaaaaaattctggaactagctagctagctgtgatggttctaaagcactgttaatgtatttaatgctactgaatggcatacttacaatggtaaattctatgttactatatttgaccttaaaaaaaattaaaggccgggtgcggtggctcacgcctgtaatcccagcactttgggaggccgaggtgggcagatcacatgaggtcaggagttcaaggaccatcctggctaacacagtgaaaccctgtctctactaaaaatacaaaaaattagccgggcgtggtggtgggcacctgtagtcctagctactcgggaggctgaggcaggagaatagcgtgaacctgggaggcggagcttgcagtgagccgagattgcactactgcactccagcctgggtgacagagcgagactccggctcaaaaaaaaaaaaaaattaaaaactggccaggcacattggcacacggctcacacctgtaatcccagcacttcgagaggccaaggcaggaagatcccttgagcccaggaaacctgtctgggcaatatagtaagacctatatagtaagaccttgtctctccaaaaaaaaaaaaaaaaaaaaatatgatttaaaaaattacctgggcatggtagtgtgcacctgtagtcccagctattcaggaggctgaggtgggaggatcatttgcttgggaggcagcagtttcagtgagccaagagaacactactgaactccagcctgggtgacagggagaccctgtctgaaagaaaaaaaattaaaaactaaagacacaatttgagctactagaaaggaaaacaacaatgcctggtataaaatatgcactggattgaataaccagatcagatatttcaggaagaaattaagacccagcaatagaaatgacataattttaaatacatgcacttaacaaattgccaaaatacgtcatgcaagaacacacagaactgcaaggtgacacagaaaaattcacagttaactgaagacttcaacacttctcagtaatacaaagatccaacaggcgtagattcagtaaacattccttttttattttaaaatacttcacaaagattgtatatgttcatgatgtacagttatgttttgatgtatatatatacattctgtaatggttaccacagtcaaattaacacattgatgaccacccatgctgtacattaaatctccagaacgtgttcaccttacaacttggtttttaacctttgaccaacatttctccattttccctaccttctggactctagtaaccaccgttcctccctctgcctcggagtttaagtttttaatattccacaattaagtgggatcatgaagtatttgcctatgtctgccttattttatagtgtccaccaggtttattcatgtgacaaatgtcaggatttcctttttacggctgagtaatattctgtttaaatatacatcacactttctttattcatccattaatggatgctaagtttgtttccatatgttgactattgtgaataatgctgtaatgaacatatgcgagtggcagatatctctttgaaatactgatcactgcctttggtcatatatgcatatacccaggagtgagactgttggatcacatggtagtttttgtttttttttgcagaacctccatattgtttttcacaatggctgtaccaatgtacattcccaccaacagtatacaaagcttcctttttctctgtactctaacactaatctctcttgatagtacccatccttgcatgtatgaggtaacatgtaattgtggttttgatttgaatttctctaatgattagtgatattaagtcccttttcatttgctttccggccatttgtatgtcttctttgaaaaaaatgtccactcagggtttttaaatttattttttcttattgtttttaccccttgcagaaaccagtctatttttcttaatttgttagttttttgagatgagaggggtctcattatgttacccaggttggtgtcgaactcctggattcaaacgatcttcctgactcacacttctgagtactgggactacaattgggcaccactatgcccagctaataatttatttatttatttattttagacatgaagtctccctatgtcgcccaggttggtcccagattcctagcctcaggcactcctcccaagtacgtggaattataggcataagccacggcacctggcctcctaaacttatgagtgttccaacttgtaatagactttgaaacatatacaacttgttggtgcgtcccaggccaatcctcacatttggctttgattagcctttatcaaattattctgcctcaacagacttaattttggtcaacaatttaactgaggtactttatagataacagtgtccattataccacaggaaatacttcagtgtttaaataatgagaaaagcaaaagctgttcccaatgacagctgctccccaactcaccacaaggcgaagtcttaccctgttgaaaactgtaacaaacctccatcagacaaagctaccaggtgaccataatggatcaaaatgaaattctgtaaccatgtctccgataacctaaaagaaaacagactccaaactttaaaaatgaccagaaatctcctaatatgacttgtgcttcttatgaattagtgttagtgccactctattctttctgcctcctagataagaactattagaattttccaaggatggaattgagttcacctaacagcatccaatacaaacacctcactttgttgaatggcaatgaaatcacctaaaagaaacacaaatcctataagaagtcctcttgagcaccctcttatggataaccctccgtcattgatgctttgtgttcatccttattacaactctttacatgccactctttgactataggtgtgattctagtggtctctggcaagatggcacagacaaaagcatgctttgttcctgtggtattctaaatgagaaattagattcatgagaaaaattgtgaccatgtaagaattttaaaaaattttttcctttacattttctttaacattttttaaagaaaaaaagtacttggacttatatgcaaatggtaatactgactcattatttagaatgtataatgaataacctgacaaaattacaaagttgacctgaaaatgcataattgcaatgggatattttaatatatattctcaggtaatggaaaatattaatacaatagttgttagtatacaagttgttttaaaagagttaataaaatatttctaagaaatacctgcagaagttgtttgataaaaatgcattgtttttatcatgtacaaacataattgagaatgtgcacatgatcacatttggctataattggaaattctcacgatctgcctgacctaagacatttgttttcacatagactgtgtcagagcagttactgcacaatgcaacagaggaacaagcccccatgttgttctatgtgactgtatcactgtagctgtcacagggaaatcaggaacacagttattaccagtattaacagaatgaagtgtttactatgcaaattagatcttgtttgaatataatctagagatgaggggagtcagaacaacagaaaatatcctcaaccatgacagttttaattagttgcctggtggattatgttgatgtgggtaatgttgttaactaaattttctagaatcttttttttttccatgttagaattcaccaatagcctaatgacatgaaagctgggaggcagaacttaagaaggctgcaaggggactgcgtggacaccggcctcctgcctgttttcctgatactttgtcctgacaatcaagagtttctttaaaacaccactgtctacttctgttttctcagacaggtagagttccacagatgtctccaccatcttcacatcaaagatataatttgcagtttggattttcctgcaagccctcatttgtccctatgcatctgtctgtctccacgcagatgggtccaaaacctgactaatgccttcttcagttctgccttccaactttcatgtcaggctactgctgaattccagcatggaatccaaaagggaatagattctagaaaatttagttcacgttacccataatcacatagcacaatctaagaggcacacctccaacctagattgtgttgtcctatcacagatcttacttcttaattcaaagtctatcatccatatcttggccagaaagaaaaagagcaaaatatggaaataatgtatataagactatattgtataaccttggcccactattcattagcaagggaaataaaataaggctcttctaaccaaaaagaagaaaggttttctcctgaggaaggtggaatatatatataatggataagggaaagccaatacctgccacaggatgccagtagaaaactcccagtaccaaactgtcatttttcaatggcccagaactattaaaacattttattaactgacttaaggaattttatttaaaaattttattaactgacttaaggaaaaaacactaccaattatacttctgcactatttcttaaagagtatttacagaataatctcacctcaatgttcatttatgaaaataagtaggaacccagagtgcagagatccactttaagaatgtggcactaagccaggcaacgcagcacacatctgtagtcccagctgctcaggaagctgaggtgggaggatctcatgagcctagaagtccgcggccagcctgggcaacatggcaagacccatctcaaaaaaaaaaataaaacaaaaaaactggcccagtgtggtggctcatacctataatcccagcactttgctgggctgaggtgggaggattacttgaggtcaggggagttggcgaccagcctgggcaagataatgttgcctgtctctacaaatatatacgtatatatatacatatataaaaatattttaaaataaaaatatattaaaaactaggaagaatcaaaaagggatgtggcactgataaatacatttataatattttttcatggcatgaattttctagagcattctacctgaattaagttatatcaggctttcctgtattacttacattcatgcaactaccctccagtatgaactttcatatcaactttgaaaatcgttaaaattgaaaaactttcgatatttacatttatagtttctattcagcgtgcactttcttcacatggtattgtaaggatgcacgccaaatgaaggcgttgccacaatccttacatttataaggtttctctccagtgtgcattctcatgtgcactcgaaagcctgtaaggaaactgaagggttttccacattctttacattcatagggtttctctccagtatgaattcgttcatgtatatgaatataactggaactactgaaggctttaccacactgtttacattcataaggtttctctccagtgtgggttctttcatgtatctggaaacctgcaagagtaatgtatgttttcccacattttttacattcatactgtttctttgcagtgtgcatcctttcatgtcttcgggcagaactgcaacaataaaaggctttcccacattccttacatttgtagggtttctctccagtatgagtcctttcatgtctttgagctgagtagtagtatctaaatgcttttccacattttttacactcaaagggtttatctccagtgtgagtactttcatgtgcttgaaaacctaaaggagacaagtaagttttcccacacagtttacattcatagtgtttctgtgcagtgtgattcctctcatgtttttgagcagtacagtggtaactgaaggctttcccacattccttgcatttgtagggtttctctccagtatgagtcttttcatgtctttgagcagagttgtgatatacgaacactttcccacattttttacattcatagggtttttctccagtgtgagttctttcatgtgcttgaaaacctacagaagatatgtaggtttttccacattgtttacattcatagcgtttctgtacagtgtgattcctttcatgtgctcgagcagaatggcggtaaatgaagggtttcccacattccttacatttgtagggtttctctccagtatgagccttttcatgtttttgagcagattggtggtatcggaatgcttttccacattctttacacttaaagggtttatctccagtgtgagtccttccatgtatttggaaagaacgttgacaactgaaggctttcccacaggccttacatttgtagactatccctgcactgtgtgttcttttatgttttttaaaagactgcagataactgaagggtttcccacatttcttacatttatatggcttctctccatattcctgacacttatacagtttgtgtctggtgtaagatctaatgtgcctgttaagggatgaatgatggctcaagacttttccacatacactgctttcccaaagctttcctccagaaggagttttcttgttcagactgagatttgcaatctggctgaaaccttctccgccatgactaccttctttactttcacagagtctctctaccatatgatttctgtaaaaaatgagtagcacattaatagttcattttttaaagattttctctttattaactgatactagaataactattttttccactttcagggaaagtacagatttttttgtcctgtctaaattgcttgtgaggtgaatgtactgaatgctatggccctgcaagagggctcaaacataactgttatgaaaacagtgattttcatatatgggtttctctttttttttttttttgagacggagtctcactctgtcacccaggctacactctgtcgcccaggctggagtgcagtggtgcgatcttggctcactgcaacctctgccacccgggttcaactgattctcctgcctcagcctcctgagtagcagggattacaggcacctgccattgcgcccggctactttttcactatgttgccgaggctggtcttgaactcctgacctcacaatccacccacctcggcttcccaaagtgctgggattataggcgggagccaccgcgcctggaccatgaacatctatgccatatttaagaaagcactttggggccaggcgtggtggctcacacctgtaatcccagcactttgggaggccgaggcgggcggatcacaaggtcaggagatcgagaccatcctggctaaacacagtgaaaccccgtctctactaaaaatacaaaaaattagccgggcgtggtggtgggcgcctgtagtcccagctactcgggaggctgaggcaggagaatggtgtgaacccaagaggcagagcttgcagtgagccgagatcacgccactgcactccagcttgggcgacagagcaagactccgtctcagaaaaaaaaaaaaaaaaaagaaaagaaagcactttgggttatttttatttatttatttttcccgagatggagcttcactcttgttgcccaggctacagtgcaatggcacaatctcggcttactgcagcctccgcctcccgggttaaagcgattctcctgcctcagcctccgaagtagctgggattacaggcatgtgccaccatgcccggctaattttgtatttttagtagagatggggtttctccatgttggtcaggctggtcttgaactcccgacctcaggtgatccggctgcctcagcttcccaaagtgctgggattacaggcatgagccactgcgctagctgggttaatattttctaagaacagatacatttgaggctcagcttgttttgtttctttaattatcaaatttaatgacatactaagatttttctcctagaatactgctttcttttctgagtgtgactcacctgagatttctcccctggtttttgtactgctcttcaatgttccattctttttgttttgttcctgaaatgcagacccagaaaaaattatcataaattattagaaattacagaaaaattattagattctaggtccatatgtgaccatgcctgatttacaaaagaattttgccttttcacattccacatcttggaatagcattgatatccaagaaaaaggtattctctaattcattcaacaacatgatggaatgatttcatttttacctatagtggccaggttcctgaaggtttcccacatcacgtctctgtagagttttttctgtgaaggatccagcaaagtccattcctcctgggtgaagttcacagccacatcttcaaaggtcactgagtcctaaaacattccaaatgtgtgtaaaggagaatgggtgagactgacagcactggacatctatactcgagtcataagatgttcacgatgattctgtgatctccagagatttattctatgaatttgttgtcagaactctaactctttggccacactccctcagtagtttatgaacacacgaaaattatttctacactttcactgtgatcacaatcatattgctttccaatggcaggatccagagcactctggaaaagtgagagaaatgctgtacaaaaaaattccattttaagaccatcaattctttgtgagaaaaactcatcttcttcttatacatcacatcactcaacattccatgagacacagggtcaaacatggataatacgtggatgaataaaagcacactgaagaactagaagctttttctactattcccatcactaagcatgagaacaagaggcacgtggaaatcaaacttgtaacaatatttacctgaccatattgtcctgaggtactctaggatattcgaggtagtcagatccagccaattcaatcaaaatatttcttttggagaagttggctgggcacaatggctcacacgtgtaatcctagcactttgggaggccgaggcgggcagattatctgagctcaagagttcgagaccagcctgggcaacatggtgaaaccctgtcttggtggctcacacctgtaatcccagcactttgggagaccgaggagggtggatcacctgaggtcgggggttccagaccagcctggctaaaatggtgaaaccccatctctactaaaaatacaaaattagctgggtgtggtggtgcatgcctataattccagctacttaggaggctgaggcaggagaatcacttgaatctgggaggtggagggtacagtgagccaagatcgcacattgcactccagcctgggcaacggagcgagactctgtctcaaaaaaaaaaaaaaattagctgggtgtagtggtgcgcatctctaatcccagctactcagggggctgaggcacgagaatagcttgagcctgggaggcagaggttgcagtgagctgagatagcaccacttctctccaccccagagaagtgttcattttcactatttgtgttaatatttatcagagacttatttctttctgtcccatttcatggagctattaagttactgggaagttagagctcaggcatgaggaataaagcatgacaactttagataaaatctctacacttctgagcctcagggatacttcctaccaatttttagcaaatatttgccatcctgagatggtaaaatgccaaaagagctctttccagcagaaccattccagttaaccttgggacttgctgaccttgaggaacaggttaagatttgcagtttacaggccaggcgcgttggctcacgcctgtaatcccagcactttggggggccgaggcaggcagatcacctgaggtcgggagtttgagaccagcctgaccaacatggagaaaccctgtctctactaataatacaaaattagctgggtgtggtagcacatgcctgtaatcccagctactagggaggctgaggcaggataattgcttgaacctgggagacagaggttgccgtgagcctagatcgcaccattgcactccagcctgggcaataagagtgaaactccatctcaaaaaaaaaaaaaaacagatttgcaatttacaataaagtgcattaaagtccacaatgatatgatgaattttcacatgattataaaatgtataaaaggttctcagcagaggtttcctccaaaagaacataaaatgccctttctccaatttaagaaggaagtgattccccagccactctagagaagagggataagagttgaattgaacttcttttcagaaaccatacgagaaagtagagtgaaatatttaaagttctgaaagaaaaaatctgtatcaagcaaaattatccttcaaatgagtccgtagtactttctgagacaaaaattgagggaatctgtcaccagtacacctgctttgcaagaaatgttaaattcaccagaaagaaagtaaataacaaagaaaggtactgcaatagaaaaggcataagtggaagcaaaatataatcattttctcatccttgattaatgtgacagataacaggttgttcaaagtaataatagctacaacatataagtacagtttatggataagtgaaatgagtaacagcattgttatgagggaggaattgggaatactctattatgagttacttgggcaaccagtgaagtggcctaagattgctagaaagagggcttgggatagctgtatactgaaaactcaagggcaaccattaaaatagtgtaaaaaaaaaaagtataatcaatatgttaagagagggaaaaaatgaaatcaggtaaggtaaagagtcaaacactgaagtcacaaagaaaattaaaaagtatgtaatctacaagtaaactacctaattatatgttgcctacaagaaactttttttttttttttttttttttttgagagacagagtctcactctgtctcccaggctagaatgcactggcacaatcttggctcactgcaacctccgcctccagggtttaagcgattctcctgcctcagcttcccaagtagctgggactatgggcgtgtgccaccacacccagctaattttttattttttagtagagacagggttttggtttacgttggccagctagtctcgaactcctgaccttaggtgatgtgcccgcctcagccgcccgaagtgctgggattacaggcgtaagccactgcacctggcttttttttttttttttttttgagacagaattgtgctctgttgcccaggctggagtgcagaggtgtggtctcagctcactgcaaccttcgactcttgggttcaagtgattctcctgtctcagcctcctgagtagctgggattacaggcacatgccaccacacctggctaatttttgtatttttagtagagagagggttttgtcatgttggccaggctggtctcaaactcctgacttcaggtgatccacctgccttggcctcccaaagtgctggtattacaggcgtgagccactgtacccgcccaaggagttgattctctaagaagacgtagagaatctatgtataatctttagcgtacatgtgcataacaaaagaactgcaaaatgcacaaggcaaaatgtgataggactacaaggagagatacatgaatccatgactatggttgagatttcaacaccctcctaccagtaattaagagatccagtaggcagaaaaaaaaacaggaaggacaggccgagtacagtggctcacgcctataatcccagcactttggggatgctgaggtagggggatcgcttgaagccaggagtttgagaccagcatggccaactagcaaaacccatctctacttaaaatacaaaaattagccaggcgtggtggcaggtgcctgtaatcccagctactcgggaggctgatgcaggagaatcgcttgaacccgggaggcaggggttacagtgggcccagatcgcaccactgcactccagcctgggtgacacagcgagactctgtctcgaaaaaggaaaaaataagaaggacacaggtgaactgaatagcaccaaacaatagattccactgaaatacatggaatccttcatccaactacagcagtatacacatacttctcaagttcacatggaacagtcaccaagataagatagactacattgtgggacataaaacaaacctaatccagaagatcacagcagattaaaaaaaaaaaacactttaacaaacttgaaagaaaaattatataaaatatgcttgcagactacaatgacaatataaaaatcaataacaaaaaaacagttgaaaaacctcaaaatacttgcagattaaaccacacacctctaaacgacccacggatgaaagtagtagttttaagggcacttaaaaactagttttttcctttttaaagattttttccttttgtgttaaaaagcagccctcaaaatctcatagaactatttttacctaaatgaatgaaaggctgggcctggtggctcacacgtgcaatcccagcactttggaggccaaggtgggccgactgcctgaggtcaggagttcgagactactctggccaacctggtgaaaccctgtctctactaaaaatacaaaaaaatcagacaagaatggtggcatgcacctgtaatctcagctacttgggaggctgaggcgggggaattgcttgaaccagggaagtggaggttgcagtgagccgcaatcgcaccactgcactccagcctgggcgacagagcgagactccatctcaaaaataataataataataataaaataaaaaataaatgaatgaaaatacagcttattaaactttgtaggggctaggcgtggtggctcacgcctataatcccagcactttgggaggctgaggtggatggatcacttgaggtcaagagttcgagaccagcctggggcaacctggcaaaaccccatctttactaaaaatacaaaaaaattagccaggcatggtggcacatgcctgtaatcccagctacttgggaggctgaggcacgggaatcacttgaacctgggaggcagaggttgtggtgaaccaagatcgtgccactgcactccagcctgggtgacagagtgagactccgtctcaaaacacacacacacacacacacacacacacacacacacacacacccctttgtgggacacagcaaaagtatatacatagaggacaagtatgctactgaacatatacactagaaaggaagaaaaatatataatcaattatctaagcatgtgctttaggaaattagaaaaagcaaattaaaaccatagtaagcaaaagaaaagaaattttttcaaatagtgaaactgcaagaaataaaaaaaaaatcaaaaccaaaagccagctctttgaaaagatgaataaaattgattaaaaaatctagtcaagctaactgaggaaaacaaagaggacagaaattactaatatcacaaatgaaaaggaaaatgaaaatgagaaagcatttggctaagtacaacttccatttatgacagcaaactagcaatagagagaaactactgcttaagaaagaacatctacaagaaacttacagctaacatcatacttaatagtgaaaaacaagatgctttcccagtaagatgaagaacaaggcaagggagtcctctcacacagcatttctattcaacatgggactggcacatagtgtggggttgcatcagaagcctgtggacaacttatgaccatctggctacctgcagggccacaagaagggggtgctaaagcctacgtagtctggccgggcacggtggctcattcctgtaatgccagcacttcgggagtccaaggtgggcggatcacctgaggtcaggagttcaagaccaacctcaacatggagaaaccccgtctctactaaaaatacaaaattagccaggcgtggtgacacgtgcctgtaatcccagctactagggaggctgaggcaggagaattgcttgaacctggggaggcggaggttgcagtgagccgagatcacaccattgcactccagcctgggcaacaagagcgaaactctgtctcaaaaaaaaaaaaaaaaaaaaaaaaaaacagcctacatagtaaaggagtcagagggcattaattgcatggcaatttgaatagtctagaagcctctgtggtaaaaatacccattcaaggtgggccaacccgcaagtcacagcataactggatttaattaaaatttgcgcacaaggattatgttgcctccagcagaacaaagaacaaaagaatctgaaagatattatgatggtgagaaagtcaatagctatttcttagcctggccaacatggtgaaacctcatctctactaaaactacaaaaaaattagccaggcatggtggtgtatgcctgtaatcccagctactcaggaggctgaggcaggggaattgctggaacctgggaggcggagattgcagtgagccgagatccactgcactccagcctgggtgacagagagatcctgtctcaaaatacaaaaacaaaaacacgctatttcttcactatgtcagagaggatgcggtcctctgcttaccacataattttcaggaatttagccaaggtgtcagtgcctcttacattctagatggggcaatagcccttccactttttgtaagctcttttctttcaatatttgtatgtcttgaatgaatgtcaaatgactgtccccagagagcaattactctttttttttttttttttttttgagacggagtcttgctctgtcacccaggctggagtgcagtggtacaatcttggctcactgcaaccaacctctgcctcccaggttcaagtgattcttgtgcctcagcctcccaagtagctgggattacaggcgctcaccatcacaccgggcaaatttttgcattttttaaagtagggacaggtttttgccatgttggccaggctggtctcaaattcctgacctcgagtgatcttcccacctcagcctcccacaggtgtgggattacaggcatgagccactgctcctggccagcaatgactctaacataatgccatgcctgtgctcctgaagaaaggtagataaaatttagatcttgccagcaaagactgcaatatcaaggctactgaggttccctgaatagaaaccagataaaggtggaccacatcccttcaaaggtgaaggtaaactgcagctaagtctgttgaaatagagactgaacaaaacctatacaaatctgtgactacagaatatctaccacttgttcattggatggaatcagtaatctccataatgttggatattgggtgtaggggctcaataggttgggattacagcagtaaattgcaacagtccactttgaggcacccagatttaagaacaagccaaattaggctgggtgcggtggctcacacctataatcccagcactttgggaggttgaggagggtagatcacctgaggtcaggagttcgagaccagcctggccaacatggtgaaaccccgtctttacttaaaaaaatacaaaaattggccaggcgtggtggctcgtgcctgtaatcccagcattttgggaggccggggcaggtggatcacgaggtcaggagtttgagagcagcctggccaacatggtgaaactccgtctctactaaaaatataaaaattaaaaatataaaaattaaccgggcgtggtggcaggtgcctgtaatcccagctacctgggaggctgaggcaggagaatcatttgaaaccggatgatggaggctgcagtgagccgagatcgcgccactgcactccagccccggcaacagcaaaactctgtctcaaaaaaaaaaaaaaaaaaaaaattcaactgggcattgtggtgcacgcctgtaatcccagctactcgggaggccaaggcagaagaatcacttgaacccggctggtggagattacagtgagccaagattgcgccactgcactctagcctgggcgatagagcgaaactctatctcaaaacaaaaaaacaaaaacaaacaaaaaaaacaggccaggccaaattaggctgttaaaaggagaaatactcggccaagtgcagtggctcatgtccgtaatcccagcactttgggaggctgaggtaggaggactgcttgagcccaggagttcaagaccagcctggacaacatagtgagatctcatctctacaaaaaaaaaaaaaaaaaaaaaaaaattagctgagcatggtggcgcacctgtggtctcagcttctcaggaagctgatgcaggaggatgcttcagcccagatgttggaggctgcagtgagctgtgattgcatcactggattccagcgtgggcaacagagtgagatcttgtctcaaaaaaaaaaaaaaaaaaaaaaaaaaagcactggggataactgccccttcactacaaccatacaaccattaatggttttgtataatagctgtcaatccttcaaggcccatcaatttacattgagtcatattaactaatttaattggggagtaagtttcatggggtcccattttgtcaatctaatttgtaactgccaaatacctaatttgaatttatggccaggtgcagtggctcatgcctgtaattccagcacactgggaggccacagcaggtgaatcacttgcggccaggagtttgagaccagcctagccaacatggcaaaacctcgtctctacgaaaaacacaagaattagatgggcgtggtggcaagtgcctgcaatcccaactactcaggaggctgaggcaggaaaattgcttaaacctgagaggcggaggctgcagtgagctgagatcccgccatgcactccagcctaggtgacagagcgagactctgtctcaataaataaataaataaataactcactggttcagagcttccttggtcactgtgggattttttaagggctgttgtctcaccctgtcacccaggctggagtgcagtggcacagtcacagctcactgcagcctcaacctcccaggcgcaagctaccctcccacctcagcctcccaagcagccaggactacaggtgcgtgccactacacccggctaatttttgtattttttgtagacacagggtcccaccatgttgcccaggctcgtcttgaactcatgggctccagcaatccacctaccttggcctcccaaagtgctgggattacaggcatgagccaccgcacctggccctatgtgatattttaagacaatttgttctataatacaaccaagaatgacttagccaacacaatagttatgatggctaaggagaggcacagggatttctgctctatttattttatattcactaattcctctatgattatcaggataccttcattaaatttgatgggatacccaggtataactataacatgagccctagtattaatcccatgaaggtttatcaactgatacagatgttaaaattcagaacctacattatagaggccaaaaacccaaggagtgccctttttatgatttttgttatgcaaattcctttaatacatttccaactgggtcaaactgtggacttctgtttcatcagtgtttttttattttgttccttcccttccctgctttgttttttggttactggatgtactctgggggagggtgtgtcctctctaacctggtactaatattttttttccccaccagagagcctgtgtcatcagggtgtcatcactgtcatcagggtgaagcacctcccctacggcaatggttgctctagaaggtttaagaaccccaggtttaagtcaggtttgaactaacttctttgttatgccacaactatgccatgggtgttatcccccactaaacccaaaggtcaagctctctgttgtgggagaggcgcatgaagcagcagcaatagcactttagggtcttgggaaagcttctgctgttaaagagtgtggactcagtccatcatctaatggctgctgttccccaccttccctccctgtcctctttttgaaggactgctcttccaggggcagccacataatgaccaacctctgacagtgtatacagtcccccctccactcccactctttacatttggggcaacccaggcatcagtcacaacttcactataaatacacaggtctcaggccgccactgcgagaggagccgccaccatgtccgcgcatctgcaatggatggtcgtgcagaactgctccagtttctgatcaagaggactatgccgacctacagcaccaagcccagtaacttgaaggccccagctccttccgctacaacgggctgattcaccacaagactgtgggcgtggagccggcagccgaggacaaaggtgtggtggtggtcacgaagcagagatccggccagccgaagcctgccacctcctacgcgcggaccaccatcaacaagaatgctggcgtcacgctcagcagcatcagacacatgatcctcaagaacaagtaccgccccgacctgcgcatggcagccatccgcagggtcagcgccatcctgtgcagccagaagcctgtgatggtgaagcggaagcggacccgcgccaccaagagctcctgagccccctgcccccaaagcaataaagagtcagctggctttctcaccaccagcccctcatgcccgcaaaaaacaaaaacaaaaacaaaaaaacaaaacaaaaacacaggtaggtccttgcccaggatgtaaacccaggaccactttaaggaaggccctactcccatactccagctccccaattccaaggaattatcaaaaactgtcaactaaagtcagctgaacctagaaccagacttggtagggctcaacaatggaagaaacacagagcagcacagcacaaagcatgtgctcccagtaagcagcagctcaaactctaaatgggccatagagcaggtcagcaattcagaacaagagaagatagacccatgagtggtggtcaatatctagacatcttgttcacagcaccaactgctagtcacctagaagggcgaggctgcaatgatgacactgatgacagtgggtctcacacacactgagagggtatgaaaaggcttattactcccatgactgacgtctctagggagaacagggcaggcctctcaagcaggtgggaaatggcttaaaaaagcaaggaagggaacttgcccagggtgtttactgtggttggaagtggggctgggcgcaagttcctctgcatgggcagctggttatgtggtttgagtctcctgcccatgacagaggaaggatgcccaggccttctcagcttgtccagaagtagggcattaagggaagaggatgaagtggtcaattgtgaaacattaaaaatgtagagtccaaccactaattacaagaacaatgttgaacagggccaggcatagtggctctggtggctcacgcttgcaatcccaatgctttggaaggccaaagtggaggatcgcttgagcccaggagttcaagaccagcctgagcaacatagccagaccccatctctatataaaaaatgaagtagctgggtgtgctggcatgtgactgtagtcctagctactcaggaggctgagatgggagaatcacttgagctcagttcaaggttacagagagctatgattgcactactgcactccagcctggatgacagagcaagaccatgtcctctgtctctaacaataacaacaacaacaaaaaagacaatgtgttcaacaatagtgaataggaaaaatacgcatttacaattgcttgtttttatataaagaaacactaacagatgcacaagttattatcaaaactggttatctgggggtggctggagcaagagcactagggtaaaccaggatattctagcagtaagttttctcaacccacactttcttttagatttttttaaacctttgtgtgtattttaaatgattgaaaaaaattatataaaccatactttactattagccattatttttaattaacttgtttctaaaatttattgacttttaactttttttaaacataggaaaccattgtaagatttcatcctttaaataatgggtataaaagtgtaaattaagaaaaaaatctctaactaaatgacaaattgcatcatattttatctttctactgtatcccagagggcagtgctttcaggaatgagtagcctatttaaagcatgatggatttaaacctaactctaaatgtaaaaaagtctcaaagattacataagttttgagtagtttccatcgtatcattaaaataggaactcaattgaattttcatcttatcaattaaaataaaaattcatttttctttttcttttttctctttttttggtggagtctcactttgatgcccaggctggagtgcaatggtgtgacctcagctcactgcaacctccgtctcccaggttcaagcaattctcctgcctcagcctcccgagtagctgagattacaggcgcacaccaccacaccaggctaatttttgtatttttagtagagacagggtttcactgtgttagccaggatggttttgatctcctgacctcatgatctgcccgcctcgacctcccaaagtgttgggattacaggcctgagccactgcacccggcccaaaattcatttttcttaaagagtagagccttttaaatgtcacatcctctagggcatatgcacatacaaaactgacttaaaaatgaaaaatgtacccgagaacttcaatgcactcatcttgcatcttaagattcttttgcacaaaaggaacacaattctgcttggttccagaattgtcttgccttacatcatatttatcaactttcattttcaaagccaaagaaacgaaaatcctacacactcacatgtataaattacaaaatgctaagggaaactacagttgaagcaccacaataaacagaaaaaggaaaccaaaggaaagaaacacaaatattctaatcagcttagcagcctgcttccccacaattcagaattgtaaaatccacacacagaaggtcaaacaccctaacaagctgggggttcagactctcaccattaaggtgtaacacctagagtagttcagtcccagattcagtttaaggttctgacccaaatgaactctcaaattcatcaatctttttttttttttttccggagacggagtttcactcttgttgcccaggctggagtgcaatggcgcaatctcccgctcaccgcaacctccatctcatgggttcaagcaattctcctgcctcagcctcctgagcagctgggattacaggcatgtggcaccacacccaactaattttgtatttttagtagagacggggtttctccatgttggtcagggtggtctcgaagtcccgacctcaggtgatccgcccgcctcagcctcccaaagtgctgggattacaggcatgagccaccatgcctggcttcaaattcatcaatcttagatccaggagacaaaagtcctaacttcacagactttctcaacatgtaaatattacactctgaatgcagcaacactggggatgcaaaacagaaggctgggagtggtggctcatgcctgtgatcccagcacctggcaggccaagatgggagtccctgaggctacaagtttgagaccagcttgggcaatgtatcaaaaccctgtctctacaaaaaacaaaaaacaaaaaaacaaaaaaattagcgctgggtgcagtggctcacgcctgtaatcccagcactttgggaggccgaggcgggcggatcacgaggtcaggagatcgagaccatcctggctaacatggtgaaaccccgtctctactaaaaatacaaaaaattagctggacatggtggcaggcgcctgtagtcccagctacttgggaggctgaggaaggagaatggcgtaaacccaggaggcagagcttccagtgagccgagatggcaccactgcactccagcctgggcgatagagcgagactccgtctcaaaaaaaaaaaaaaaaaaattagccaagcatgatagcatgtgcctgtagtcctagctacttgggaggctgaggtgggaggatcacttgagcccaggaggctgcagtgagccaagactgtgccactgcaccccagcctgggtgacagagtaagaccctgtatcaaacgaaacaacaactacccctcaaatccactgtctaaaaacaggcccaaggaaactacaattacaaccccagaagtatcacgctgttcccctccccaccacgtacatgtggatccccagttttccaatgctcagtttctgtcagtaccaaaggggtctttccttgataggtgtgagtatgtaggacacctgctctccttgataagcgtgagtacgtaggacacctgcaggggaagcaccctaaggagaaccacctgggtcttaattacttcccttggcagagtcaaaggtggccttaccttctagtcactgcctcaggcctccgctcactagtcatgcggctttagaacacttttgatattttaaatgagaaaaacccagtgtttcaagaattcagcaaaatcactcaaaccaagtatttatgtataaagcatggaagcaaactgtaaaacattatctagtttcaaaacaaaacccacaaatatctattccttttggaaaatgaagttaattataaatgattatttaatcactagtcaaactattaatcattaatcatgataaactataatcattagtcaaactaataatgtaatcaatagttaattattataaacaatttttttttagagggggtctcactctgtcacccaggttggagtgcagtggcacaatcttggctcactgcaacctccaccttgcaggctcaagcgatcctcccacctcagcctccaaaataggtgggaccacaggcacgcaccactatgcctgactaattttttgtattttttgttagagacagggtttcgccatgttgcccaggctggtctggagctcctgagctcaggagatccacctgccttggcctcccaaaatgctggggttacaggcatgagtcactgtgcccagccagaagtggttttctaaacaatcatattttaacacacctaggaattgtaagtctaagccctggaattcctcttgaaatcaaccaaaagaaaaaaacgagcctcagaaacttagaagaaaaaggggttaaaataatatttaggctaggcacagtggctcatgcccgtaatcccaacattttgggaggatcacttgagctcaggagttcgagaccagcctgggcaacataaagaggcacgctctctacaaaaaattagctgggtgtggtggtcccagctactcgggaggctgaagtgggaagatcggttgagatggggaggtcgaagctgcagtaagccttgatccccccagtgcattcaagcctcagcgagagggagacactgtctcaaacaaacaaacaaaaaaagcaggatgtaatactggatttcttttttccagaaattcacctttcttggcctttttggaaatattttgtaccatccttcacgctctagtgattgaacacaccttacatttacctaaatactaacacacaatcgagtcgacgttttcaaggtgataaagccggggaggctcagtgctgatccgcaactatgctcaaggacagatcacccagaaaaatttccaaagaggatcctcaacacgtaagatgtctgtgccaaggaaagatactgggaggtgaggcacaaccatttcatacaactaacttccaagctgctatctctgctttcctctctcgtaaaatatccacgaacaacaacaaaattaaatctaaaagactaatcctttgctctgtggaaaatagattattaaaacacagtaagttttccctaaaagtcgtcgagagggtcttagaaactgcgactttatggtataacaaaacctatttgtttccttatcaacgatgtaaggaacattctagaacctggtgcacgtcgtttcgctaaagttgcacccaaggcgggaattctccccatgaccctcccatggtccccgcacaatctgggggagacgcgggcctgcgggcgcggagctgcccagagagggctctggggctgggggcgaagtcaccacgcagggacaggacaggacgcccggggtcccgactgccggccggaccagggccaccctgcggccaaggggaccgagggccgagctgtgccatggggactagagccccagaccccggagtcgcccgcagggaggcccgggtcccgccacagccggtcccagccagcccctcctcccgcgtgtcgggaccccagcccggcacactcaccatttcctggactccagggtgtcccagcatcctcctgatggctctcctggccacagcagggcaaatcgcgacacaccctgagctgacacaccctcagcactttcagagaagccgagagcgacccgagggcgccaaggcgagagggaaaaaaaacccaaacccacgggctttagcgcgtcgccccgcctgctgccctacagcacgcctgattggactgttggcacggccccgccctcagaacccctaattggatagtgccctaggcccctccccctggggtgggggacacagtgcagagaggagaggtaaggcaagcgcctgagaggggccagaatgacagattcttgaccattgcccttgccagcttgggcatcctccctgatccattttcccctatcaataagttaaatgagtccaagatcctcaaacctattgtttaaataagaaaccagcaggacatgccctcgccagaggacattggaatttaagaacttgctcctggctttccagagctggcactggcgtctccctgtactaatgggactttctttcttcttcctcttggacaaaagggaattgcattctcagtggccaaaggaacgatcctcgtgcctcagagcaggaggggtgcctagaccaggtcacactggaacatgggagagggcttgatgtcctccaggggtcaggaatttggaaagaaaggctgttggtggcatggcgaaggcttcctcacaccttatccctcagtctactcattttttcttttttcttttttttttttttgagacagagtcttgctctgtcgcccaggctggagtgcagtggcgtggcatgatctcgggtcactgcaacctctgcctcacgggttcaagcaattctcctgcctcagcctcctgagtagctgagattacaggcacccaccaccacaccaggctaatttttgtattttagtagagacggagtttcaccttgttggtcaggctggtctcgaactcctgacctcaaatgatccacctgccttggccttgcaaagtgctgggattacaggagtgagccaccgtgcccggcctgcctactcattttcagccaaaaaattaaaacacaccaacaagggaatacagttatttaatatatgggaaaaaggggagttatatgacagcaatattctataaaggaataaaaacggaagaaaaggaaacatctgaattggttcatttaagcagtctacactgcactaccatttacaaggaaaacgccaagtgacaaacatattcccaagctggggagtcagactctgttgaaaggggcccaagagtctatcagtccctggtgatgaggcagagaaacctaaggatttaactctgggagctcaacatgtcctcctgttcccacctcatgtgggaacaatcttcccttcaagatctttattttcaaaagcaagaaactctcacctggagtcagtttaaggttctgccctaaactgtcaactttataaacccttcttctaggagacaacccaaatgagacttagtctctaagtctcaccttgacagattgtcttttttttttttttaatttttgagacagagtcttgctctgtcaaccaggctggagtacagtggtgtgatctcggttcactgcaaactctgcctcccaggttcaagcgattctcctgtctcagcctcccaagaagctgggattacaggcgagcgtgaccacacctggctaatttttgtatttttaacagagacagggtttcaccatgttggccaggctagtctcaaactcctaacctcaggtgatccgcctgcctcggcctcccaaagtgctgggattacatgggcctttggtgttcttacacacacacacagacacacacacacacacacacacacacacacacacacaagctccttccccaccccagtcacaaagatactctcctacatctgatgctaactttgtatttttgcttttcatcattttagtgttaattttcacatatgatatgagataaaggtctcagttcatctttctgcaggttaatatccagttgtcccagcaccatgttgaaaacgctttccccattatcttggggcatttgtagaaaatcaacagaccataaatgaagattatttctggtctctctattctgttctactggtctatgtctaacattatactagtaaatctggctaatctactacctgccctgttgatggatggccccatttcattccacatgattgccttgcaggtccagaaatggtttcagagccaggagaaaatctctttattattatttaacttacactgttatttattttgagacagggtctcactctgtcacccaggctggagtacagaggcatgatcatagctcaccacagcctcaaactcctgggttcaagttatcctcccacccagtaactgggactacaagcacatgtcagcatgcctggctaatttttttttttttttttttctgagacagggtcttgctctgttgcctaggctggcgtgcaatggcacaatcatggctcactccaatctcaccctgccaagctcaagcaatccttccacctcagcttcccgaatagctgagactacaggcgtgcaccactaccccaactaatttttaaaattatctgtagacacatggtctccctatgttgctgagactagtctcaaattcctagactcaagtgatcctcctgccttagcctcccaaagtgttgggattacaggcttgagccaccatgcctgggcccctggctatgagaatctgggaagcactccaaccacaagtaaatagttcatccacacctggatactccaaaatcactgcaccctggatacactgactgtctgcccagcaaggagagtgagcgaccactgctggaaaatactgcttttatgtgcatgacatgagaaaaattgtgtctagtttacacattctaaaaaagaaggccgggcacagtggctcacgcctgtaatcccagcactttgggaggccaaggcagatggatcacaaggtcaggagattgagaccatcctggctaacacggtgaaaccctgtctctactaaaaatacaaaattagccaggcatggcggcgggtgcctgtaatcccagctactcgggaggctgaggcaggagaatcacttgaacccaggaggcagaggttgcagtgagccgagatagcaccattgcactccagcctgggcaacaagagtgaaactccatctcaaaaaataaaataaaataaaataagagatggagtctcactatgttccccaggctggtcttgaactcctggcctcaagcgatcctcccacctcagcctcccaaagtgctggaattacagatgttgtgtcaccacacctggccaatagttataaatgttataacatttctttgatgatgcaaattttctggagcactatacatgagttaatttggattggattttcccaaattacttacattatgggatttctccccaatgagcactgggatgaggagacttcaatccaccaaagttgtatatatatatatccatggaggtgatacttaggtcatctcatcagaaaacactcatacttgtccacaaatagatgttgcatatggcattagtaccatcctcagaaatttatatatatttgcaagaaatattattttaagtcaatagtatatgctatcatgaatacaggatatgctcactccataagcagcaaattgactccttcacagttttaatagatttccagttgttttgtcttcagtctcctaagaagacaatgctataatctccaaccacattatttgcttcttccatcccattcttcatattgatcattgttgtgtgacattagttgactactgtaatgataaataactagggtaaaatagatacatttgctctttcttaggttccattcctcctttcagtgggaagcctcacacacactctcatcatgctctgctatgaaacatagcttaaccaagaatcgtatatccagcaaagctcatgttcaatacaaaacaaaaatttaatttttctgttatgctgatgaaaaagtgtaagtgatgttcttgccttctaacactgttatcgctgccacagccacttggtcaaggatcatcaagcagattaaggcaatttacacccatttcaactttttttttttcttcttgagaccgagtctcactctgtcacccagactggagtgcagtggtaggatcttggctcactgcaacctctgcctcctgggttcaagtgattctcctgcctcagccttccaagtagctgggactacatgcgcatgacaccaggcccagctaatttttgtatttttagtagagatggggtttcaccatgttgaccaggctggtatcaaacttttgacctcaagttgatccatctgcctcagcctcctaaagtgctaggattacaggtgtgaacaagtgtgcccagccccacctcaatatttatacaatttatgttgccttgattctaaccctgactgtaccacagtgtacttatggaagagcttcacaattgcagatgcaactgtgcttactgcagaggctgtagatgccctaaagcccaggacacccaaagcatattggaagccattggagtgagggagtaagtgatttcaggggtttccccaagactgatacagcagtcaggaatatcttaaatgttgcaaagaaagttggtggaaaggaaactgaagatatactgaaatcctctacaagtgatgatgatgatgatgatgatgatgatgatgctgctgatgatgcagaagattaagaagaggagcagtgccattgatttggacacgcgaaaaatttgcagcagatcttggggcatctatagcctctgcaagttgcaagtgttaaagataatcaacctcagctaacatcctttgattgaaaaaagcttctgtgtcatataagggaaaatatgctaatgaacactaaggtttttttagggattcaaagaaaaagaactagcttcctaaaacaatgcttctaactaaatatctgcaaatatgaagacatacccttcaacacaaacatcttcagccctcaagctgaacagatgctgacattagtattagcctcctgcaaagagtcaacatcttcaatcagaacctgggtcttccaacatagatgaaggtcttgatgtcctgtcaagattcaagttagcctgaggtctcactgtttatctatgatgccacacatctagtcacctctacacatcacattaggcaccatacagcaatcatcattgtcataaccatcgtaatacttgggttatcaagagagaagaaccagaattgtggttggtgttaacacattctttcaggtcattagacaaaagtaatctgagtattgaaacaagaaactgtaacattataggtgatatatacgatgtagataggcctgcaatggttgggtctgtactgaacacatatagattttttttcttatgattccctaaacaatacaactatgtacacagcttttacaatgcatgagatattttaattaatctagacatttatagagtatacaggagaatgtgggtaggtacatgcgaatattccattttataaaagagctggcatctgtggatttaggtatactcagggtgtactggaaccaatcttcttgcatatagcaggcagcaactctatttgaaagaaatggaaacttttttttttttttttgagatggagtctcgctctagcacccaagctggagtgcagtagtgcaatctcggctcactgcaacctccacctcccgggttcaagggattctcctgcctcagcctcctgagtagctaggactacaggtgtgagcaactatgcctggctatttttttttttttccgtatttttagtagagacagggtttcccatgttagccaggctggtctcgatctcctggcctcgtgatctgccctcctcggcctctcaaagtgctgggattacaggtgtgagccgctgcgcccagcctggaaacttcttaaggctttaccacgtttacattcacaggatttatttctttcaagtatctgaatgtgataaaaccaatgaatgctttcccacattccatacacttatagaatatccttccagtgtgtccttttatgtctattaaaggaactgagagaactgaaggctttcccacattccttacattcatagggcttctctccagtgtgagttctttcatgttctcgacagaaactggaacgactgaaggctttaccacagtgtttacattcatagggtctttctccagtgtgagtcctttcatgtcttagaaggaaagagggccaaaagaatgctttcctgcattgcttacattcatatggcttctctgccgtgtgagtcctttcatgagtttttaagtaactgaaacgactgaaggctttgccacaaatttgacactcataagatttttcttcactgtgagtcctttcatggcgacaaaagtatttaaaagaactaaatgctttcccacactccttacattcataaggctcctcttcactgtgtgttgtttcatgactttgaaaggaaaataaatcactaaaagcttttccacatttacatttatagggttgctctccagtgtgtgttgtttcatgttttcgaagggaactggaagtacggaaggctttcccacattgcttgcattcatagggtttctctccagtgtgagtcctttcatgtctttgaaatacactaggagaatcaaaggctttcccacatactgtgcatttatgagggccatctccagtgtgtgccatcatgtgtcttcgaaagcttgagcgatgagataacaatttcccacattgcttacattcatagggtttctctagagtgtgagttccttcatgaattcgtgctgaaccaggaaaatcaaagcctttcccacatatcttacatttatgaggtccatctccactgtgcattatcatgtgtctttgaaagcttccaagatgacaaaacgctttcccacactgtttacatgtatagggtttctctccagtgtgaattctttcatgtactcgaagggaaccggaaacactgaaggctttcccacattgtttacatttgtagggtttctctccagtgtgagttctttcatgtcttagatatgaactgtaatcagggaaggctttagaacactgcttacattcatacggtttctccccagtgtgtattttttcatgtcttagataggaactgtaaacagggaaggctttagaacactgcttacattcatatggtttctctccagtgtgagttctttcatgcatacgtaataaactgggccaaaaaaaggctttcccacacaattcacatttataaggtccatctccaccttttactaccatatgtcttcgaaggtttccaggagaactgaaggtttttccacattccttacaatcatagggtttctttccagtgtgaggcctttcacatgtttgaaaggagtggcgataacttaagcctttcccacactgcttatgtgtatatgacttctctgcatattcatgacactcccggtgtttgtgtccagtatcaactctgatgtagcaattcagggatgaatgacccattatgacttctccattcacactgcttccacatgcatctactctggcgggagtgttcttgtttacaatactatttcgaatctggcttaaggtttctccacactgactaccatctttacttttaccaaatctctctaccacatcacacctgtaaaaaatgaaaagtacattactaaaggtttattattgaatttatatttatcaacaggtattagatttacatttttaacattatcaggcaagctataagcttcatgtcctgcttcaatgtgaatggactgaatgttgtgcaagataactcaatcccagctattttcaagacaatgatatgcacatggggattcttaattcttttttttttttttttttttttttgagatggagtctccctctgtcatcaggctggagtgcagctggtgctgtctcggcttgctgcaacctccgcctcccaggttcaagtgattctcctgcctcagcctcccaagtagctgggactacaggcatgcaccaccacacccagctaatttttgtgtatttttagtagagatggggtttcaccatgttggccaggttggtctcgatctcctgacctcgtggatccacccacctcggcctcccaaagtgctgggattacaggcataagccactgcgcctggccttttttttttttttaagacagggtcttgctctgtcacttaggttagagtgcaccagtgccatcacagatcactgcagcctcaaactcccaggctcaagtgatcctcctgtctcagcctcccaaagtgctgggattgcgggcatgagctaccacacccagcctcatatgggaaatcttaatattgtttccatgggaactactttgcaaacactgaatagctatgtcacatttaataatatatttatgtcacatttaataatatatttttatagagaaatttttctaagaataaataaatttaagctgggcttgttcataatctttgcttctttttaaaagttcttgtcattctcagaaacactgcaaggacatcacctgtctcttataagtacaaattaccttggatttctcctgagattttggtgctgatcatcaatgttctggttttcccatttcattcctaaaagagagatccagaaaattcactataaattattacaaaatgatacaaaaattgttaagattttatgtacactacaatcatgtatgattcattcattgaactatagttgactcctgaacaacacaggtttgaactgcacaagtccatttatatataaatgttcttcagtctctgctacccctgagacagcaatatcaacccctcttcttagttagcctactcaatgtgaagatgaggatgaaaaccttcatgatgatccatttcaacttaatgcagagtaaatatagtttttcttccttaagattttcttattaatatttactttctctaggccgggcatagtggctcatgcctgtaatcccagcactttgggaggccgaggtgggcagatcacaaggtcaggagatcgagaccatcctggctaacatgttgaaaccctgtctctactaaaaatacaaaaaattagctgggcatggtggcgggcgcctgtagtcccagctactcaggaggctgaggcaagaatggtgtgaacccgggaggcggagcttgtagtgagccaagatggagccactgcactccagcctgggcgacagagcaagactccatctcaaaaaaaaagaaaaaaaatttactttctctaacttactttattctgagaatacagtatgcaatacatatgacatatatgtgctcgtcacttgtttatatgactgataaggctgctggtcaaaagtaggttaagctgtggcagacaaaagattatatgaggacatacaacaggttggggcctggcacttcaccctgtgttgttcaggaatgaactgtatcccttttccatatttcaaatcactgaacagcattgatgaccacaaaacaaatgtctctaattgaccaaatgaagacatgatgtcatccatacctatacagttcaggttcctaatggtttctcgcatcacatctctgtagagattcttctgtgatggacccagcaaagcccactcctcatgggtgaagttcacagccacatcctcaaaggccactgagtcctgaaacatcccatatgtccagaaaaggaaggttgaaactcacagtactgagaacctatactcaccttcataaacttcccatgatgctgtggtttccaagcatttattcaatgacgtggtaaatccactcttattctgtgtctgcactcactgtctgatgctggaattctgatgctggaattgggcttgctaaaataacagttgagtaggaacatatctcttattggtgaattatgcaagtgaatcttattgcctggattactcctaatgtctgtttctacagtgggtctgtagtccttgtcatgacaaagtcctaccacctactgtgcaaaagagagttacaattagcagtcctgagacggcatatccttacaactgcttgttcacaatgttgaacctttcgtggtgtctagacaatgtatttaggggagggccccgtaagcataactaataaagggggtggagtgtgcctaaactatttgtgtaaaaattatggtatttgcttaactcctaacttccctctgagagtttggaattgtattacatcctcagcagaggaagtgtacccaatcagccactgctaggtttgaatgtcttcccctccaaaatgcaggctgaaactgaatctccaatgtggaagtaatcaaaggtagtggtttaagaggtgagtgggtcttgagggtttggaacacatggatggattaatccactcatgtatgaatggcttaataaataaactggttatcacagatgaggttctggtgtccttatgagaagaggaagatacttcagctagacactcagccccctcatcatgtaatgccctgtaccacccagggactctacagagtccccatcagcaagaagattcccaccagatgcccactttgaccttacttgatcttcccagctttcagaactgcaaaaaataaatatcatttcttatagattaccccagttctggtatcctgttgtaagtaacaaaaaaacagtcttatagactaagacatacacaaagaaacactctaggcacagggtccctaatgtgcaactctggtagatgatatttcatatttttgttgttgttgttttttcaatgtcttacttgggggatttagcctatcctacgtgattacacagagagaatatttggaagctggtgactggttccctgtagatcaaatgtagttaagtatgacaaaagactaataaaagagattttaccaactaaatagaaaaaattgtaactttctactgggtaatgtcgaaggagaaagaaaagaagaggacagactgcaaatgttcttagacagaattcagtgtcagctttcatgaatatcaattatattccataaatctcaacagcagacatttaataatcaataacattacataaaccaatttttatagaagtcataaatgtctaaagatgcttaaaaaaaaccttctcatcaagaaagtagacagctttacaaaaacaaacagaagatttaaaactgtaatttttcacatcccatactattaacagagagaaaaagatacataaacaggaaagtgaaaaatgatagaaaagccttgtattgttttttctttggccccatctctgcccatctcattgccagtcctgaagacagcagagttcccagtgtagaactctgatcaccacagagtgtacagatcacattttgtttccacattattgcctttgtatttttgaatcagtctggggactaaccgaaggtctgaaacaaggctctcttttctatttcatctacaacagaatccaatcagagtcaaactgggcaggaactactttaaaatgttgtaaaatacacaaaaagtgtgcaaccacctaggacaacacaagatgactaagacatacattagaaggccaggtgtggtggctcacacctgtaatcccagtactttgggaggccaaggtgttgggaacaggcccccaaatctagccataaacaaaatctctgcagcactgtgacatgctcgtgatggctatgacgcacatgctgaaggttgttggtttaccggaatgagggcaaggaacacctggcccacccagggtggaaaactgcttaaggcgttcctgaaccacaaacaatagcatgggccatctgtgccttaaggacaagttcctgctgcagataactagccagagcccttccctttgtttcccgtaaggaaggcttttagttagtctataatctatagaaacaacgcttatcactggcttactgtcaataaatatgtgggtaaaactctgtttgtggctctcagctctgaaggctgtcagccccctgatttcccactccacactctaaatttctgtgtgtgtgtgtctttaattcctctagtgccgctgggttaggctctccacgactgagctggtctcggcaccaagggggtcagattgcttaaaggcaaggagttcaagaccagcctgggcaatgtggggagacctcatctctacaaaaaataaacaaaattaggtgggtatggtggcgcatgcctgtagtcccagctactcaggaaagtaggagaattgcttgagcctaggaggttgaggctgcagtgaaccacgattgtgccactgcactcaagtctgagtgaaagagtgacactatttcaaggaaaaaaaaaaaagacatatattagaccatctaagtcccaggagaaaaggctagggtataatttttctttacaaataagcatatttgaaagcacccagatatactggggaatggagaaagccccacgcaggcacaggaaacaatatatttttataaaagatgggtggggattctgtttttcagctctggctaacatccagatttaaacagaaagagaaggctacagtagtaaatactgtggctaagtgctcaaagaatgccccagcagagagccatccatgaagactggaagaggtcaggtttttgtttgtttcatcttcttttttacttttagcttctaacattcaggaaatctctgtcagaacgctggatgaacacaagctaaagtcaggaaatctctgtcagaacactgcatgatcacaagctaaagaacagagacttcagtgtttatacccagtaggaaatacagtctctgcaaactaatttggaaatgttactaaacaaatgaataggccaggtgcagtggctgaagcctgtaataccagaactttgggaggctgagggaggaggaccacttgaggccaggagtttgagaccagcctgggcaacatagtgagattctgtctctatttaaaaaaaagaaaaagaaatgaataatttcagccttcaagcaagaataccaaacaattaaggggcaaaaatctgatttccagagttacccagttataacattcaaatgtctccttttcaatacccccacccccaaaaaaaccccagagaaataaataaaacagagaaacatgaaaatacgactcattaatggaaacaatttgagataaatctgagaaacctcagacactggatttactgaataaaaacagtaaagcaactgtcttaaatatatttaacttagtaaagacaataataaacaaagaactaagagaaaaccagaaaattgatgtagggataaaataataccaaaatatgttaaaaattgagccatatagaatttctgcagctgcaagatacaacaacttaaatgaaaacatcactaaaggtattcaacagatgtgagcaaccagtggaaaaaaaaaactaaaatgaaggtaaaacaattgaaattacctggtctgagttaaaaaaaaaaagaagttcatcagaaagaaaaaaatgatatgggttagaaattcagattgtgtgtgtgtgtgtgtgtgtgtgtatacacacacatatatatgaagagtgttaggaaacaattaaatgaaggcacaaaaaattctttactcttcttatacctatctgatctaatagatataggtttattcaaaataataatatcaaattagctgggcgtggtggtgcacagctgtaatcccagctactagggaggctgaggcaggacaattgcttgaacccaggaggcagaggttgcagtgagccgagatcatgccattgcactccagcctgggaaacagagtgagattctgtctcaaaagaaaaaataataatatcaacaatgtattcagtagtttatagctcccagttgaactaatgaatgaaagtaatgttatatgtgatgggaggaagaacagtctatcacacttcggaactgtctattataccagcactattcctgaagccagtatagtactatttgaaattgaaggcccattagttgtgaatgctatactacaaactctggggaactcactaatagaatctaagaaaaagtagactatatagatatataatatagaaaataaaatcatatagaatgctcagctaaaaggaaaaagggcagaaaagagaagttaaaaaacacagagaagaacaacaaatagaaaacaataatatacatgtttatctgaatccaattatgccaactgccacttaaatgtgtattatctatattcaccagtaaaaaagaaagggactggcagagtgaaataaaaaacaaggccccaaactatatttttaaaaagtattttaaacagaaagacacagatacattaaatacacaagtatgaagaaatacatgccattctagccctgatcaaaagaaatttggaagacctatattacattcagacaaatcaggttttagattttttaaaaattacaagggatagagagatttcataatgatcaagaagtcaatcctacacgacataataatccttaacatctatgcccataaaacagagcatcaaaatacataatgcaaaaacatataaaaccacaaggcaaaatacacaaatctaggattatagttgagggaaaacaactcacctctatcaataattgacagatcagttctgcagaaaatcactaatgatatagctgaactcaacagcactatcaatcaactggatttaattgaaacatatttatagaatcattcattcaacaacagcatacatattcttctcaagcctacatgaaatattcaccaagatgaacaatattctcagccataaaacacacttgaacaaattttttaaagtatgcgatcaaatcatattagaattaatgtaaaaattagtaacagaagcatagttgaaaaacctcaacaaagtggagattgaagccacaaacttctcaactacacaaacttcaaggagaattgtcaagcaaaatgtaaatattgcaatgttgatgaaaagtgatatatcttagcaaaatctttggaatggagtaaaggcagtgctttgagggaaatttaaagaattaaatgcatttcctagaaagtaaaggtttaaaatcaacaccctaaccttccattttaggaaactagagaaaaatgacaagattaatgtaaatcaaacagaggaaagtaacgatgagaagagatattaatgaaatagcaatgaagaaatcagtagaaaacatcaacaaaccaacagatggttctttggaaacatcattaaaattcataagcccatagccaagttaactcagaaaaaagaggagccatcactactactcccatggacagtaaaatgaccataaaaaactattaggaacaactaagtgcccacatatttgataaaattacacagaatggaccaattccttgaaagacactatctaccaaaactcacaaaaagagacctaagtaatatgaataggcctgtatctactgaagatattaataaataataaatgtcccagaaaaaataagcaacaggtcagaacgatttcactgctgaattctggcaagcgtttatggaagaaatgataccaattctctacaatctcttccagaaaacagaagcagaggaaacaccttctattccattttataaggccaacattgccctaacaccaaaactagacagacattacagacatatctccaccatgtgaggacataagggttagactgccatcttcaaaccaggtagcaggcccttaccagaggcctcatctgcttgatattggactttcagcctctacacctttgagaaatgaatgtttgttgtctaaggcatgcagtgtatggcaatctggtatagcagtcctaagtgactaagagaggtagactctttctctacacacattaggctttgaagtctacaggaatcaggtcactggtctcacatataggcattaagctccctgccaagataaagaagtgataacctacaggtcacatttggcaggtttccaaatcaacccacttggagaagtcttcttttttttttttttttttgagacggagtcttgctctgtcacccaggctggagtgcaatagcacgatctcagctcactgcaacctccgcctcccaggttcaaacaattctcctgcctcagcctctcgagcagctgggattataggtgtccgctaccatgcccggctaatttttgtattttttagtagagacaggatttcgccatgttggtcaggctggtctcgaatttctgacctgaggtgatccgcccacctaggcctcccaaagtgctgggattacaggcatgagataccacgcctggcgagaagtcttctaattaaatggcttacattctgtctgtgagtaaaggatcttatcatgagtccctcaaatcttattgtgagttcttcaaactgttgatatgattaacgttatctactaacatcaaaaaagacactgatttatttctgaatcatgttttgctgattgtcttccacttagaacattttagcctgtcagctgtcatctataggcaatgattgtaacgtctatattgtacccttcaaggaaaatgacaattccggtatgaatagtcctccagcttctcctaaactttctcataaaggcatccaacttgtaatcaattttggaacacatccaaatttgttggtgtgtcttctcaagttgatcctcaaatttggcttacaataaaactttatcaaattgtatctgcctcaatggccttatttttggtaaacaaaagtatcccatgaaaggcgcaatgtaaccatccccaaccaaatccctggagacacaccagagcagagataaagtttatagccagtttcaagagacagacctaaagattaaattagaagaatatacaacacctatgaaagacaaaagcagcacacttttagaaattacagaaatttttttttctttttgagacagagtctcgcactgtctacccagacttgagtgcagtggcgtgatcttggctcactgcaagctccgcctcccgagttcatgccattctcctgcctcagcctcctgagtagctgggattacaggcatccaccaccacgcctggctaatttttttgtatttttagtagagacggggtttcaccgtattagccaggatggtcatgatcttctgacctcatgatccgccctcctcggcctcccaaagtgctgggattacaggcataagccaccacgcccagccagaaaaaatgtttttcttatttaacaagagtcttcttatataagaaaataaagtagcttccaaaggagaagtctggtaaattgaactctaattacattaagaagaagcaggcatagtgactcacatctataatcccagtactgtgggaggccaaggcaagaggaactcttgaggccaggaatttgaaaccagcccggcaacatggcagaccctctggctacacaaaattaaaaaattagccaagtgtggtggcacatgcctatagtcccagctacttgggagcccaggagtttgaggctgcagtgagctgattatgccactgcagtccagcctgggtgacagagctggacattatctaaaaaaataaaaaatttaggaagagttcatctaagtagaataaatttaaaagataaaccaccatctgaaaggaaatattaccaatccctccatgtaaaaaaggattcgtgtataaagtatgcctaaaacaaaaagagagaaacaaagcaaacatttgcatttactatgcaaatgaattaaatgactgagaattatttcacagatgaaagcccacaaaggcggtatgttcaacatgaatgctaatccagtaaaaacacaatatataatcatatggagataatacataatcacatggagataactaaaagataaatattaaaaggtatagcttcttctccaagaaaacaccaaatggctgatgacgcaggtgcagcgcgggggtccagaggccctggggaccctgggatggggaaccgcagtggcttccgcggagatttcggcagtggcatccggggccggggccgcggagctctgagaggcaaggccgaggataagaagtggatgcccgttaccaagctgggctgcctggtcaaggacatgaagatctagtccctggaggagatctatctcttctccctgcccatcaaggaatctgagatcattgacttgttcctgggggcctctctcaaggacgaggttttgattacaccagtgcagaagcagacccgtgccggccagtgcaccaggttcaaggcgtttgttgccatcggggactacaatggccatgtccgtctgggagttaagtgctccaaggaggcagccactgccatccgcggggccatcatcctggccaagctctccactgtcctcgtgcgcagaggctactgggggaacaagatcggcaagccccacaccgtcccttgcaaggtgacaggccactgcggctctgtgctggtgcgcctcatccccgcacccagggacactggcatcgtctcagcgcctgtgcccaagaagctgctcatgatggctggtatcagtgactgatacacctcagcccggggctgcactgccatcctgggcaacttcgccaaggccacctttgatgtcatctctaagacctacagctacctaacccctgacctctggaaggagactgtattcaccaagtctccctatcaggaattcactgaccacctcgttaagacccacaccagagtctctgtgcagaggacccaggctccagctgtggctacaacatagggctttcatacaagaaaaataaagtaaattaagcctgaaaaaaatgtataaacagacatgtatgcattgtttgtttgtttgttttttgagacagattttcactcttgttgcccaggctggagtgcaaagacgcgatctcggctcactgcaacctccacctcccgggtccaagcaattctcctggctcagcctcccgagtagctgggattacaggcgcccgccaccacgtccggatattttgtgcttttagtagaaatggtgtttcaccatgttggccaggctaatctcaaactcctgacctcaggtgatccacccaccaaggcttcccaaagtgctgggacaacaggcgtgagccacagcacccggcctggtcagacagttaatccacacatgctattatgatttcctagtaaactgaagtttgtctataatctataacccagcaatgttcccccatgtgttgaaaaattcatgaactgttagcatgtagagacaaaaccaaaaataacattgtcaacaacatcaaaaaattaacttaaaagtcaagtcctggccaggcgcggtggctcacgcctgtaatcctaacactttgggaggccgaggctggcggatcacgaggtcaggagatcgagaccatcctggagaacacaatgaaaccccatctctactaaaaatacaaaaaaattagccaggcgtggtggcgggcgcctgtagtcccagctactcaggaggctgaggcaggagaatggcgtgaacccgggggtcagagcttgcagtgagccgagatcacgccactgcactctagcctgggtgacagagcgagactccatctcaaaaaaaactcaaaaaaaagtcaagtcctatgagcactgcaatgtgtgagtaaactgcatgacccatagcctcagattttagcatgtgtcaaacagattgaggcaaataaagaaaacaaaaatcttttcagcacaatttttgtgtttttcccccgttcatcctttcttgatgtctctgaatcaaatcaatattctctagtgttccaatttagttactaattatatttacattttagtgatatctttttgcattatattttaacaggttgctctgatgaactagttctcatgcatgagaatcatctgaagggcttgttaaaaaacaggccattggaggccgggcgcggtggctcatgcctgtaatcccagcactttgggagaccgaggtgggtggatcacaaagtcaggagttcgagaccagcatggccaagatgatgaaaccccgtctctactaaaaatacaaaaattagccgggcgtggtggcgggtgcctgtagtcctagctgctcgggaggctgaggcagaaaattgcttgaacctgggaggcagaggtaggttgcagtgagctgagattgtgctactgcactccagcctgggtgaaagagcgagacttggtctcaaaaaaaagaaagaaagaaaacagatcattggggctggttgcagtggctcacatctgtaatcccagcactttgggaggctgaggcaggtggatctcttgaggtcaggagttcgagaccagcctggccaacatggtgaaactccatctctactaaaaatacaaaaattagccaggcgtggtggtgcacacctgtagtcccagctactcgggaggctgaggcagaggttgcagtgagccaagattgcaccactgcactccagcctgggcaatagagtaagactctgtctcaaaaataaaaaataaaaaaaaaatcattgggccccattccaagaattactaattcagtagccttgggtaataccctaaaatgtgcattccttttatatatatatatacacacacacacacacgtataatatatatatatatacacatatatgtataaattatatatatatattcatggagtaccagtgcaattttactacattgatatattgccttgtaaagtcaggcctttcagtgcatccatccctggagcaacccccattatccaccaaataacctccctcatccccatgagtcttcactgtccacatatatacacattcttctttttttttccttgagacggaatctcgctctgtcacccactgcagcctccgcctcctgggttcaagggattctcctgcctcagcctcccgagtagctgggactacaggcatgtgccaccacgcctggctaattttttgtatttttagtagagatggggtttcaccgcattagccaggatggtcttgatctcctgacctcgtgatccacctgcctcagcctcccaaagtgctgggattacaagcgtgagacaccgtgcctgtccctgtacacattctttaactaccacttataaatgagaacaggcagtatttgtctttctgtgtctgagttgtttcacttaagatcatggcctcccattccatccatattgttgcaaaagacacaatttcattatttttaatgtctgaatagtattccactgtgtgaatataccacattttcattattcaatcttctgttgatggacacttaggctaattttgtatgtttgctattgtgaatagtctgcaataaacacatgagtgcagggaactttttgatgtaatgatttccactcctttgggtagacaccctgtagtaggaatggcttttcagcattatatggatggtatgttaatggtagtattaactaactggaaactgaagaggcaaaattatgcttatgggtgaatacatactgaacctataatgagtaacaatgacaaattcagagttatggttctgacccatggtgtattttatctaacattacttctgacagcaaatatgtagcatttgctgaacacgagccaattctccaagaaaaactggtgttcaataattcaatgctgacaccacttaacatttccacagaccccacaaattgagggctcagttccacaacagggaccctactgcagatgccaaatgcaagccctagggaccacccttttaaccaaatgtgtataaaaccaacaactctactatcagatttaataatttgctacaacaagttgaagaactcagttaaacaagttgcttaaggttatcagtttgttataaagtatatgtcaagaatacctaaatggaagacatatgtcagccctccaagacattttaatttgtgcaatttcactctaattaaaccaactcactgaatacaaaaccaagcagctgataaagttcaattttacaaaagccctgtaatcctggtaataaacatgatttaagaggccaggcacagtggctcacacctataatcccagcactttgggaggctgaggtaggcaaataatgaggtcagaagtttgagaccagcctggccaacatgatgaaaccccatctctactaaaaatagaaaaattagccaggcatagttgcacacgccagtaatcccagctactcaggaggctgaggcaggagaatagcttgaacctaggaggcgaggttggagggaggcggaggttgcagtgagccaagatcacaccattgtactccagcctgggacaaagagtgagactccgtctcaaaaaaaaaaaaaaatgtatatatatatatatatatatatatatatatgaaatcacctgacccccaccaccatgcccagttctttctgttctggacaagtagcccagtgcaaagaaacatccttcactgacatcaattctggctcccgcctttttaacctgtaacaaggccctccaaattcccattctttgtcttataaataactagctgaacagttttgcctctactgattactctgaacaaaatgcttccaaaggaaacttgtggccaggcctgatggctcacgtctctaattccagcactttgggaggctgaagtgggtggatctcttgagcccaggagttcaagaccagcctgggcaacatggtgaaaccctgtctctacaaaaaatacaaaaatattagctgggcatggggttgtatacctgtagtctcagctaccctgaaggctgagatgggacaatcccctcagcctggggaggtcaaggctgcagtgagctgtgatggccccactgcactctagtctgagcaagagtgaaattgtgtctcaaaaaaacaaacaaacaaaaaaacagaaaagaaaggaaactatttaagtttctctctttcttctaggccactgatttttgacacaccctcagcctaagccaaaacacaacccctccttcatgactcatcccatgaacaggcttgagtcagggtaaaacactctgtgatctagaatctgattttcaccctccatcctgccctctccctctcatttcctttgtaatgttggttgctcttcaccttgaaaacaactttccacctaagctttaagacgctttcagatcttatacttagtgctcttctcccttatgtagcgctgttttagaataaactcattctttttttttttttttttttgagatggagtcttgttctgtcgcccaggctgaagtgcagtggcatgatctcggctcactgcaagctccgcctccccagttcacaccattctcctgcctcagcctcccgagtagcacccgccagcatgcctggctaattttttgtattttcagtagagatggggtttcaccatgttagccaggatggtcacgatctccggaccttgcaatccgcctgcctcgacctcccaaagtggtgggattaccggcgtgagccaccgtgcctggcctagaataaactcatttcttagctaaatccagatttatcttacctgaagactgtctagtgacagccctacaataacaaacacaacctcagacatggcatcaccccatctgcctctgcctgtggatccccagatttccagtgctctgtagcttctcttagtataaaaggctctttggctgggcgtggtggctcacgcctgtaatcccagcactttgggaggccaaggcgggcagatcacctgaggtcgggagttcaagaccagcctgaccaacatggagaaaccccatctctactaaaaatacaaaattagctgggcatggtggcacatgcctataatcccagctactcaggaggctgaggcaggagaatcacttgaaactgggaggcagaggttgtggtgagccaagatcatgccgttgcagttgcactccagcctgggcaacaagagtgaaactccgtcttaaacaaaaaaaaaaaaaaggctcctcccaggccaggcacagtggttcacgcctgtaatcccagcactttgggaggccaaggccggtggatcacaaggtcaggagttgagaccagcctgaccaacatggtgaaaccccatcgctactaaaaatacaaaaattagctgggcatggtggcacacgcctgtaatcccagctactgaagaggctgaggcaggagaatcgcttgaacccggaaggcagaggttgcagtgagctgagatcacagcatttcactccagcctgggcaacagagtgagactctacctcaaataaataaataaataaataaataaaaataaaaataaattttaaaaaaagctcctcccattgctggagtgattaggctgggacacctgcaggggaggctccccaggaagaaccaactaaactgggcccacaatgacctccctttgcaggctcaaaattggcctccacttggagtcactggcctcaagcctctccaccccagtcaaggccatttgcttaccctttcatgccttacgtggatttaaaacataaaacaaacaaacaaaactccatgtgtgatgaatctatcaaaatcactcaaattcagtgtttacaggagggaaggaaattgtaagtcacttctattttatagctcaacaagaaaagcacaagtatctatccatctcagataataaacatcagttactacttccataataatgaagcctttagtaaacaaaggatatttaagttctttagctattgcaaagtcccacagaatgttgcattaatctgccaagtccagataacaggaacagaccagacttatccactgtcccaagttctccagcctaaaaagaagagaaactaaagttttgataaagctttataattcaaccaaatacctaccacacattcttgtgaaaatatattcatttttctgcagccaaaatggaagagttttcccaaatttttcccttggtagtatttacactgctaagccctgaaattccatttgaaatcatccaataaaagacctgagaaacctattacatggtctctggggtaataaaagtaaataaaagttttttaaaaatgctccagcctgggcgacacggtgaaaccccatctctaccaaaaatacaaaaattagccaggtgtggtggcgcacgcctgtagtcgcagctacttgggatgctgaggtggaaggatctcttgagccctggaggcagaggttgcagtaagctgagatcgtaccacagcactcctgggtgatagagggagaccatgtctcaaaaaaaaaagaaaaaggctgcgtgcagtggctcacacctgtaatcccagaactttcattggccgaggcgggaggatcacctgaggtcaggagttcaagaccagcctggccagcaaggtgaaaccctgtctctacttaaaaatacaaaattagccaggcatggtggcatgttcctgtaatcccagctattcgggaggctgaggaaggagaattgcttgaacctgggaggcagaggttgcagtgaaccaagatagtaccattgcactccagcctgggcaatatagtgaaactccatctcagaaaaaaaaaaaaaagaaaagaaaagaaaaaaagtttttaaaaaatggaatagggcctgggtccagtggctcatgcctgtaatcccagcactttgggaggccaaggcaggaggatcacttgagcccgggacttcaagaccagcctggcaacatgaggaaaccccatcactacaaaatactcaaaaattagtagggcatggtgggcattcccagctactccggaggctgagcccaggcagtctaggctgcctaagctgcagtgagccatgatggtgccactacactccagcctgggcaacagagggagaccctgtcttataaaaaataaaaataataaaaaaaaggaatagaaaactacatatatataatttgttttctgaattccaactctttctggcctctttagaaacactttatcttctctataatctctaatgataggatgccctttacagttaataaaaaattaaattggaaataactgaacaaatcttttcagggtaactaacccagggtggggcagaactgactggaacacagacaagtctcactcaaccgtcaggtcaggtcgttctatcacctggcacatccgccagccccacggtgctcattgaagtgctcagcaaccacattcctaggagacactgccttatgtctttttcaggctcatgcaaaacctcattgggtgggtttttcagtttttagaaacagttttctagcttcacagtcggagagagtccagaaggcagaaatcatttgtcttgtcccctgaataacaccatccaattttctgataagccatgcgtcaccaaggaatggaaactaggcttggggaaaaaaatgtcaatgtcccagaggttaggtttttttttttttttttttttttttgagacagagtttccctcttgtcgcccaggctggagtgcaatggcatgattgtgatttcggctcactgcaacctccacctcccaggttcaagtgattctcctgcctcagcctcccatgtagctgggattacaggcacctgccaccatgcccggctaatttttgtattttcagtagagatggggtttcaccatgttggccagggtggtcttgaacccctgacctcaggtgatccgcccgcctcggcttcccaaagtgctgggattacaggcgtgagccaccgcgcccagcccaggggttagctttttacaggaatgatataccagaagattcctcccaccccagtgcatccacctgatcctttgggaggccccactccaacacctcaggctgtcctctgggaagagtgacccaagggccgatatccactaggccctccatgagattggcagcttccagcatcttagggtagccccagaaagttccataacacagggcctggaaaagatacagggtgggctgaggtcacatcaccctgtaaaggacatactgagaaggcatctgtgcctaggggagataaaagaggcacaaaggtttggttttttttacagcagtgtcaggtggttattctcttcttcctcacatgtgaaatgttaaggaaaacaaaataaatctgtttaaaaagagccatacattgctatctgaaaacaaacgacaaaattctgtgtctatttgaaatatcgtcttgctgacaaagggttcataacgttactgggaattgaggagtgaagttagcatatggaaggctctggaaaccaaaagatttactgttagccccaagaggagttaggatgaagggacaggtctcaaagaccctgatgccaatatctttgaaagcctcggaggagaaatggtcgcccttggaaagaaaggactgaagagcacagagaccacagctcctcccacacacaaaccccacacacgagtctggtttgtgcctagtgaccctcccaccgtcaccgtgcagcctcctcaccgggctcacaggaactgcgagccaggctggaggcgagattgcagttagatattaaccaggtgccctcagccccgctgcttcacaggaagccgcctccctgagagtcaggtcacagcagacgctgaccgccggcttccccattggcctggggataagatctctgagagttgctcaagagtcgtctaagttctttctcagatcttgaattccagcggaaaggctggcgccaagcaggctgaagaccccacaaggaagcccactcagcagcagaatgcggtttcttcacctccagtcccaagattcacccctcacttctccaccaaccagcgaccccacatcccaaccacccccgtccagacccctaaacaccccatcctcaaacctctcacggaggcggatctagggtgtcctctcctattaaaccgtttctgctgcagccctcggcgtccgggtgcagtgacttgggctgcgaacctgtactggttccgccgcacaatctggggagaagcggggctgagggcgcggagctgcccagagaggggcgccggggccggggccgcagtcgcagctcagggacgggacaggacgcccggggtcccggctgccggcccagccccaccctgcggccaaacggaccgaggaccgaggtgcgcagggggcgctcaggtcccagaccccaaagacgctgcggcgaggcccgggtcccgccacagccggttccgactggttccgaccagcccttcgccctgcctcaggacgccgggccccgcacactcaccatttcccggctgtgcggtgtcccgggtcctcccaactcccgtagtcagggtaggtcccagcgcgacaaaagccaccacagatgtcccagggcgtctctcagtgacagaatacggaacagaggtcaccagggtgaagaggccactagctcctggaacgtcacaccctcctctctgcctcgcgcctgattgacaattctcaggaacccgcccacgactttgattgggtagccctccaggtcccgcctcctgggcactgagtgacagaagaagcgatctcacagtgctgagtgcagccggatgaacaggttccagacccggcccctggcagggcgggcttcctccctgcgttgtgacccgacccgtcccgggaaacgtttgccttaaagcggaatttcctacctgtacgcagtgggccctttttgcttcttcctcctgaacaattgtgtgcaaggaatcccagactcactgtccagtggagccatcccttggcctcagagcaggagggcagccgaggccacacaggccacactgtagcagcgggggacagggggtgggtgggtgggggggtggtgctgatgtcctccagggaccaggaatttgggatgaggctgtcgcctgcaaggtcaagcctttcttccactataagcgctggatgggttctttctgcgcgctacgcaaataaagaccacggtattgcagttaaaaaaaaagtttaataaacactaggccagctacgatacgtgagagacggagttactactcaaattattctcatccaaggtcctctggtaggggtttttcaagggcagtttgggagaaagggtggaggtagctaggcttgctactgactggttggggtggggatgaaatcactggggatggaatctgtcctcttggcagtgcgtggtggctcaccgctgtaatcccaatactttgggaggcctaggtgggaggatcgcttgaggccagtagttcaagaccagcctggacatagagtgaaactccgtctctatactataagggaggagaccacccctcatattgtcttatgcccaatttctgcctccaaagaagaagtaaaaactaaaaggcagaaatgaaatccacaggcagataacccggcttgtgccctgggctgggtagttaaaaatcaacctctgacctaactgtgttatctatgattccagacattgtatggaaaagcactgtgaaaatccctgtcctgttctgttcagttctggttaccggtgcatgcagcccccagtcacgtacccactgtttgctccatcaatcacgaccctctcacgcggactcctagttgtaagcccttaaaagggacaagaattgctcactcggggagctcggtttttggagacgtgagtccgccgatgctcccagcccagctgaataaagccctttccttccacaactcggtgtctgaggggttcttgtctgcggcttgtactgctacatatttaaaaaagaaaaaaagaggccgggcccggtggctcacacctgtaatcccagaactttgggaggcccaggcgggcggatcacctgaggtcgggagtttgagaccagcctgaccaacatggagaaagctcgtctctactaaaaatacaaaattagctgggcgtggtggcacatgtctgtaatcccagctacctgggaggctaaggcgggagaatcacttgaacccgggaggtggaggttgcggtgagctgagatcgcgccaagccgagatcgtgcctttgcactccagcctgggcaacaagagcgaaactccgtctcaaaaaaaaacaaaaaaaagacaaaaaaaaaaaaaacctatcctgttatgctgaatcacttctggttggggccacaggagcagagttggcaggtgcaggtggtgtcagacatgcaaaaaaaaaacaaacaaacaaacaaaaactgaaaatacgtctacaaatgctaatctacaatagtggtgttatctgcagaaatagctggcaatctatgtctacactttagcagcattccgattcctttcatccctcagcctgatggccattcattcgttttacaaaggcagttgagttttggggaaggcttattatcatttaagctatcttccaaagttagctgtgcctaagagcccaggattaagggaaagagaagacagagggttggcaggggcggggggcggggcggggcagaacgggtgttggctcagatctcttccactgccataattttctcactgatataatttttttgcgatctattcattttcatcccagaaaataaaaacacatcaacaatgaaatgaaattgttaaatgtgtgaaaaaactggaattatagggcagcatggttgttttttttttgttttattttgttgtttttgtttttgttgttgttgtttttgagatagagtctcactctgttgcccaggcttgagtgtagtggcgcgatctcggcccactgcaacctccgactcccaggttcaagcgattctcctgcctcagcctcccgagtagctgagactacaggtgcacaccaccatgcccagctaatttttgtttttttagtagagatagtgtttcaccatgttggcctggctggtgttgaactccttacctcaggtttatttgcttgcctctgccttccaaagtgctgggattccaggcatgagccaccacacctggcctgacagcatgtattctattaaaggaatcagaagagaagaaaagaaaaaatatctcgttcagggaagtaagcaggaaaccccctttcaggaagttaaacagattcccgagcttgagagccagactcttgactcctgaaatggagccccagagtggatcagcacctgatgatgagggagagacattgaaggatttaactctgggagctcaacttgccctcctctgcacagtgtagaaacactctttccttcaagactttaaatgttaatgacttaaaagctccaatcggaagccgaaacattagggaatgaatttgaaaacatgagggtttccccatatttctatgaagcaaaagtagaaaacctaaaaccaccatgaactggaagctggaactaatggctaaaaaagaaaggagtcaaacatcaggtgtcattcgatgaaataaaatctttattcaatttgtaaaaatggtagtgtttccagacaggaaaaatgggcatgtttggaaaataaggaaaagaaatgatatctgattatagctaacaaataaatgatactcttgccttcaaaaatcacacaaagacacacacacacacacacacacacacagagagagagagagagagagagagagagaaagagagatatcctatcacctagcactttgggaggccgaggcaggcggatcacaagttcaggagttggagatcagcctggccagtatggtgaaactccgtctctactaaaaatacaaaaattagctgggcatggtggggcgcggtggctcacgcctgtaatcccagcactttgggaggccaaggcgggcagatcacgaggtcaggagattgagaccatcctggccaacacggggaaaccccatctctactaaaaatacaaaaaaattagccgggcgtggtggcgggcgcctgtagtcccagctactcgggaggctgaggcaggagaatggcgtgaacccaggaagcacagcttgcagtgagctgagatcatgccactgcactccagcctgggtgacagagcgagactccgtctcaaaaaaaaaaaaaaaaagaaatgcagaggatcaggtcttatccatgacctgcttaatgagaagctggatttgaaggtctgtagtttcctgtgaaagtttgagaagtgcatctgacagtgattagtgattcagcccaaagggtatttcatactcctcaccggtgagataattgaattcacagagtatctgaggtaggggagatccagtgggctgtgaggggctggggctggaactgaaagcaaagactggcgagacatcccgaagaagacaatgtgggccgggcgcggtggctcacacctgtaatcccagcactttggaaggctgaggtgggtggatcacaaggtcaggagttcgagaccaggctggccaacatggtgaaaccccgtctctactaaaaatacaaaaattagctgggcatggtggtgcgcacctgtagtcccagctactagggaggctgaggcaggagaatcgcttgtacctgggaggtggaggttgcactccagcctgggtgacagagcgagactccgtctcaaaaaaaaaaaaagaaaagaaaaaaaagaagacaatgtggatgaaagcgaggccactttaccaacactggtatggcctggctcgctgatcctcactatgggaacgaccactcatgataactgaccaggagtgtctgtgggccattgatcaccacactcaggccccagagcatgcgcactccaaccaatcctcgcaacttggaatgagagaaaataggcacacagagaagtgaggaaatggaggccctgtttgttgagctggggaggaatgggatatgatggaggtgaaatgtttctgctttccttgagggccaaaagacattataggccatgtgagacagagatgggccacactgttcagtttggcagggatattcagtacctgccatactgtcagtggaaagtcacaacaaataccaaaatgtcatctttcaaaggatccttgcttgcacaattttaaaaccaggccaggggtggtggctcatgcctgtaatcccagcactttgggaggctgagtcgggtggatcacctgaggtcaggagctccagaccagcctggccaacgtggtgaaacccagtctctactaaaagtacaaaaattagctgggcgtggtggcacacgcctgaagtcccagctactcaggaggctgaggcaggagagtcgcttgaacctgggaggcagaggttgcagtgagccgagatcatgccactgcacacaagcctgggtgataaagagagactctgtctcaaaaacaaaacaaaacaaaaaacccgtatgaaaactaaacctggctgggcgcggtggttcatgcctgtaatcccagcactttgggaggccgaggcggacggatcgcgaggtctggagatcgagaccatcctggctaacatgatgaaaccccgtctctactaaaaatacaaaaaattagccaggcattgtggcgggtgcctgtagtcccagctactggggaggctgaggcaggagaatggcgtgaacccgggaggtggagcttgcagtgagccaagatcatgccactgcattccagcctgggcgacacagcaacactccgtctcaaaaaagaaaaaaaaaaattctgtctggctggactcggtggctcatgcctgtaatcctagcactttgggaggtctaggtaggcggatcacctgaggttaggagtttgagaccaggctgaccaacatggagaaacctcgtctctactaaaaatacaaaattagccggtcgtggtggcacatgcctgtaatcccagctactcaggaggctgaggcaggagaatcgcttgaacctgggaggcggaggttgtggtgagccaagattgcaccattgcaccattgcacaccagcctgggcaacaagagcgaaactctgtctcaaaaaaaaaaaaaatctgtctatattttcaataagcaggtagtgtgacaggttaaggaggacagaaaaaaataaaaatggatgcggaacttacccatgatatcacagccttacgctggaagatggtggtttctttttcttctttctctttttttttttttttgagacacggtctcattcccacacctaggctggagtgcagtggtatgatcctggctcactgcggccttgacctctggagcacaggtgatcctcccacttcagcctcctgagtagctgggactataggtgcctgtcaccacacccagctactttttgtattttttgtagagccagggttttgccacgttacccaggctgtcaggctggtctcaaactcctggactcaagggatccacccacctcggcctcccaaagtgctgggattacgggcatgaaccaccacgcctagactggaagatggtttcttttttttttttttttgagatggagtctcgctctgtcacccaggctggagtgcagtggcgcgatctcagctcactgcacactccgcctcccaggttcacaccattctcctgcctcagcctcccgaataaaataaaataaaataaagtaaaataaaataaaataaaataaaataaaataaaataaaataaaataaaataaaataaaataaaatgaataaaataaaataaaatactggaggtctcagcacaaccctgagaaatccacaccctagaaacaatgtgtgaatgttaatgccacccttactacaacatggaactttttatttttcttactggaaaatggctaaaaacagtttattggaggactttatttttaaagagttggggtctcactctgtggcccaggctggagtgcagttgtgtgatcataccttaccgtaacctgaaactcctgggctcaagtgatttttcccaactcagcctcccaaacagctggaggacttttatacaggagaatatagatagaagtaaaggaaactcagtttggtttcatttatataatttaacttttcctaggttaagaaagcaataaagtctataaaccttaaatggatttccctgaatatgaaaagtgcaagaaataaattctacaaatggaaagacgtaggagtaattgaagtggtacgaagaagtctccttgagaaggtgacatttaatgtgagacctgaaatgtatattagtgtaaaaactcagggcacagccggggagggtggctcacacctgtaatcccagcactttgagatgctgagacaggaggatcactggaggccaggagtttgagaccaccctgggtaacatagcaaaacaacttctctacaaaataatgaaaaaattaggtaggcaaagcaacacaagcctgggcatgatagtcacagatcaggaggctaacgtggttagaatgtttgcacccagaaggtcaaggctgcagggagccatcatcaggccactgcactccatcctgggcaacagagccagaaacggtctcaaaacaaaaacaaaaacagtcaaccaagaagtcaatatctggcaacagtgtctttcaaaagtgaggaagaggcagggcacggtggctcacagctgtaatcccgacactttgggaggctgaggctggcggatcacctgaggtcaggagtttgaaaccagcctggccaccatggtgaaaccccatctctactaaaaatacaaaaattaggcaggcatggtggcgcacacctgtattctcagctactcagggggctaaggcaagagaatagcttgaacccgggaggcaggggtttctgtgagccgagattacgccactgtacttcagcctgggcgacaaagggagactccatttcagaaaaaaaaaaaaaaaaaaaaaaaacaggaagaaattaagaaattttcacataaacaaaaactgaagtagttttttttgttgttgtttttttaaattttgttttgttttttcaatcattagaggtgttctgcatgaaatgcaaagggtgccctggagggtgaaattgaagtacactagacagtattgggaggccttatgtgaaaataaaaatctcagtaaaaacaaatacatggacaatgataaaagctagtattattgtacaataattttgaacttcaggttttgttttctacataacttaagagcctaatgtatataaaatatatttgtctaaaagtgaatattattttaagttggacttggaactccatattttttatatagtttaagagacatggccaggcatggtagctcacgcctgtaatcccggcactttgggagaccgaggcaggtggatcacctgaggtcacgagttcgagaccagcctgaccaatatggtgaaaccctgtctgtactaaaaatacaaaaattagctgggcgtggtggcaggcgcctgtaatcccagctacttgggaggctgaggcagaagaattgcttgaacccgggaggcagaggtggcagtgagccgagattgtaccactgcactccagtctggatgacagagcaggactccatctcaaaaaaagaaaaaaggaacaaatgcattaaaaatatcctttttttgacacacaaagtagaaggatgcaaatttatgacatcaacttaaaagaggtgtgaatgaacctataatggtgtagcattttggtatgttattgaagttaaattggcatcaatttagagtgttgtaactttaggatagtaaatgtaatctccatggcaattataaacaatacagcaagagcatatacacaaaacaaaataagaaggaaatttaaatgtttcactacaaaaagcaactaaaagcaaaagaacacagtaatacaggaaatgagggacaaaaaagctataaggaatacagaaaacaaacagcagaatgccggaagatcctccttatcagaaattactttaaatgttaatgcattaaactcttcaatcaaaagataagacatctgacttttaatttgaaaacatgaggatttccccatatttttataaagtggaagtaccagatataaaagcattatgaactggaagctggaacccacggctaagaagaaaggagccaaacatcagatgtcattagatgaaacaaaatctttagtcaacttgtaaaaactgtaatgttttctgccgcgacatgtgggcatgttaggaaaataagaaaaaaaaatgatgtctgagtataactaatgaataaatgatactatttccttagggaactacacacagacacagacacagacacacacacacacacacacacacacacacacacacacacacacaaacacacacagtctaagatcacaggacattgttccttccctgaaaaataaactactgctctgtaagatgctccactcctcactcctcacattaactgctcctggaataatgtcatattttgttgtttgcagataggcattaaaagagggtgtagcgggctgggcgcggtggctcatgcctgtaatccaagcactttgggaggccgaggagggcggatcacgaggtcaggagatcaagaccatcctggctaacatggtgaaactctgtctctctaaaaatacaaaaaattagccgggcatggtggtgggcgcctgtagtcccagctactcgggaggctgaggcaggagaatggcatgaacccaggaagcggagcttgcagtgagccgagatggcgccactgcactccagcctgggcaacagagcgagactccatctcaaaaaaaaaaaaaaggcgggtgtagggccaggcgcagtggctcacccctgtaatcccagcactttgggaggccaaggtgggtggatcacgagatcaagagatcgagacatggtgaaaccccatctctactaaaaatacaaaaattacctgggcatggtggcgcatgcctgtagtcccagctactagggaggctaaggcaggagaattgcttgaacccgggaggcagaggctgcagtgagccgagattgcaccattgcactccagcctggcgacagagtgagactccatctcaggccgggtgtggtggctcatgcctataatcccagcactttgggaggccaaggcaggcggatcacgaggtcaggagttcaagaccagcctggccaacatggagaaaccccatctctactaaaaatacaaaaatttgccgggcatagtggtgcatacctgtaatcccagctactcgggaggctgaggcaggagaatcgcttgaacccaggaggcggaggttgcagtgagccgagatcgcgccatggcactcaagcctgagcaacagagcaagactccatctcaaaaagaaaaaaagaaaaaaagaaaaagaagggggtgtagtgtgtcgaactaagtgggtgtcaggggttcacttacagactttgtatgtttttacaaactgcagcaattaagtcgtcaattaccgtgttgatttaaatacatataaaaactttcagacaaaaatagacgttcacattaccatgatgaaaaaagtcagtaatggtgattcctctgtgaaactagaaaagaaatccagtggttaaacttggcagctccaagggtatcactgccccctaggacagtggtccccaacctttttggtagcagggagcagtttcatggaagacaacttttccacagactgcgggggaggggtgcggttttgggaggattcagctgcattaaatctattgtgcactttatttctattattattacattgtaatatatgatgaaataattatacaactcaccataatgtagaatcagtgagagccctgagcttgttttcctacaactagatggtctcatctggaggtgacgggagacactgacagatcatcaggcattagattctcataaggggcgtgcaacctaaatccctcacatgcacagttcacaacagggttcgtgctcctatgagaatctaatgctactgctgatgtgacaggaggcagagttccggcagtaacgtgagtggcccagttcctaacaggccatggacctattactgatccgttgcccaggggttagggacccctgccctaggcaacatcttgaagatctatttgaaatacacttcttgacttttcttttttctttttgagacagagtcttgctgtgctgcccaggctggagtgtagtggtgcgatctcagctcattgcaccctctgcctcctgggttcaagagattctcccacctcagcctcttgagtagctgggattacaggcatgcgccaccacactggctaattttttgtatttttagaagagatgaggttttgccacgttggccaggctggtctcaaactcctggcctcaagcgatctgcccgcctcagcctcccaaagtgctgggactacaggtatgaggcaccgtgcccagcctgaaatacatttcaatacaagttattcccctgaataaagaatcagctcttatcaaagcctaaagtgatcaaatgcttgccaaaagctgccgttgatccgggtttttttctgtttttttttttttttttttttttttgagagaagtctcactcttatcccccaggtttgagtgcaatggctcgatcttggctcactgcaacctctgcctcctgggttcaaatgattctcctgcctctgcctcccaagtaactgggattaagtcgcctgccaccacacctggctaatttttgtatattttagtagagatggggtttcaccatgttggccaggctggttttgaactcctgaccacaagtgatctgcccgcctcggcctcacaaaatgctgggattacaggcatgagccactgcgcccgtcaatccagttttgtttcattcaaactctctgtggcctgtgacataggtgaccactctcccatcttgaaataccttctcctggaggattccaggaagggacacccaattcattctcctcctaagtcactggcctgcccagtctcttgcaggctgctcctcctgctaacctcagaggtggacagccattggtctcctcctgagcacttgtcttctgctacactttgccccttaccctgaaacaaggtggcttctgctggacccagggcatcaaatagcatccatatgataatgttttccaaatttcatttagatctttctctcaggctccagatccaataccctggtcaacacttcgcttgtttgactcaaacatgccatgagtgattacaaaacataacccttcatttcccctccaatcatctcccctggccttggtcctctgagtgaggggaagcacccaggggctctgaaaataggattcatccttgcctctcttctctccttcactccatcagaaatcctacgggagctgcccctgcctgtgtaactcctagtcaaccttcaggaatttttttttgttttttttgagacgagtcttgctctgtcgcccaggctggagtccagtggcgtgatctcggctcactgcaacctctgcctcccagattcaagcaattctcctgcctcagcctcccatgtagctgggattacaagcatgtgccaccatacctggctaatttttgtgttttttagtagaggcagagtttcaccatgttggccaggttggtctagtctggaattcctgacctcaagtgatcagcccacctcagcctccaaaagtgttggaattacaggcgtaagccactgcgcctggccaccttcaggctttgagaattagtctcactggggaagcctcccttagtctctcagactagtgtgagaaccctctccaccatcatattttagagccacacactcttctctactgcgctgaagacgatcaccactgatcctttgtttatgtccagaactgctaaacagtgggattgatggggcctttccccaccctggaacccggctccaaaaacacagcttgggttcataactagacttctcaatacacaaccttctgtcgatatccactaatattacccaaacccacgccagcacagcctctcttcaaactacaactatggcttttaagctggtctcccaggtcccctctaccatctattctctgcccaccagcaggagtaagcttcttcaaacacaaaccaaacatcacttctctgctcaaaatcccataaacggccgggcgcgatggctcacgcctataatcccagcactttaggaggccaaggttggtggatcacaaggtcaggagtttgagaccagcctggccaatatggtaaaaccccgtctctaccaaaaatacaaaaattagctgggcatggtggcaggcacctgtagtcccagctactcgggaaactaaagcaggagaatcacttgaacccgggaggcagaggttgcagtgagccgagatcgtgccattgtactccagcctggacgacagagcaagactctgtctcaaaaaaaaaaaaaaactataaaagtgtaacctatctttaaaagcgtaacttatcctataaaagtgtaactttactgcctatctaaccacgtcttttattacctgagcactctatgttccatggaccaacacgatgacacgtgggagcgagttagaaacgtggactctcacactctgtccctaatctgctgagccagaagctgaatttgaggatctatagttccccgtgaaatttcagaagtgcgtcttacaagtttcccccttaacctgacccagccataagggtattgcatattcctcaccactagggtatttgaattaacagaacatctcaggtgggggcagcaaggggctggggctggggctggaactgggagaggagacaagtgagacatccttaagaagatgatgtggcgagggcgaggccgccttcccagcactgctatgtcctggcccactgctcttgaagtgcaggaatggccactcacgggaactgatcaggaggatgcatgtgtgctcagcaatgtgctgaggctgtagcgcttgcacatggccacccatgtgctcagtctgggagtttggtattcagggaagcgtgtgcaccagcaggcagcaaaagtatgtgggtcctccttgccagccagcccatactgctcggggatgggctgaaagtgatggagaagaagggttttctttgctccaagaggccagtggtaaagtcacaacaaacaccaaaatgtcatgtttcataagctctttagctatacagcaattttaaaaccatctaagaattaaacatatttctgggcacagtggctcacacttgcaatcccagcactttcagaggcttaggttggaggatcgcttgaggccaggagctagaggccagcttgggcaacaaagtgaggcccccatctctaaaaaaaaaaaaaaaaaaaaatatatatatatatatatatatatacacacacacacatatatatacacatatatatgtatgtgtatatatatatgtatatatatatgtatgtgtgtgtatatatatatacacgtatatatatattagcaaggcgtggcagggtgtgcctctagttccagttacttgggaggctgaggcaagaggatgccctgagcccaggttcgaggttacagtgagctatgatcatgccactgtactctatcctggtgagacaaaatgagaccctatctctaaacagaaaaataaaagaagaggcaattaaacctaagtgtctattagaaatacacttcaatgctgggcacggtggctcacgcctgtaatcccaacagtttgggaggccgaagcgggtggatcacccgaggtcacgagtttaagaccagcctggccaacatggtgaaatcttgtctctactaaaaatacaaaaatgagctgggcatggtggcgggcacctgtaatcccagctactcaggaggctgaggcaggagaatcgcttgaacccgggaggcagaggtttcagtgagccgagatcacgccactgccctccagcctgggcaacagagtgagactctgtctcaaaaaaaaaagaaaagaaaaagaaagaaatatacttcaagcaactcaagaatcccagagaatacaaaatggaaagaaattttattaactgcttctattaagaaaacactattcgacttatgaacctttatgtgaagaaaacttgcaaaaatatctcacatcaatttttgtatgaaagtaagaagtaggattcatagtgtagattcatgttaagaatgaggcactggtaaagagaaagagaatagagttatacgttttcatttctttcctattgcaaattctctggagcattatacatgtcttaattttaatcagattttcctaaattacttacatttatagcatttctagacagcaggggttgggatgaagaaacttcaatccagcaaagtttgtatatatacattcatggaggtgacatttaagtcatttcattaggaaactctttattttttattttttatttttttgagacggagtgttgctctgtcacccaggctagagtgcagtggcactatctcggctcaccacaatctccgcctcccgagttcaagcaattctcctgcctcagtctcccgagtaacctcctgagtacaggcacccgctactccgcccggctaatttttgtatttttagtagagacggggtttcaccatgttggccaggctggtctcgaactcctgacctcgtgatctacccacctcggcctcccaaagtgctgagattacaggcgttagccactgtgcctggcccattaggaaactcttaaagttgtctgcagatagatactgcacatggaattagtcctagtccttggaaagttatatgattttaattcaatagtgtatattactgtgaataccgtatatgtttcatctctaagcaggaaattgaatccattaacagtgttaatagttttgggttttttttttttttttagacagggtctcactctgtcactcaggctagagtgcagtggtgcaatcttggctcactgcagcatcgacttcccaggctcaagcaatccttccatctcagcctcctgagtagctgggactacaggaacacaccaccagacctgggtaattttttgtattttttgtagagatgaggtttcgccatgttgcccaggctggtctcgaactcctgggctcaagcgatccatccacctcagcctcccaaagtgctgggatgacaggcatgagccaccacacctggccaacagtgttaatagttttccagttgttttgtctttagtttcccaagcaatgaatgctattatggtcaaacatcatacttgcttcttccatccctttcaacatattgatcattgctttttttttgatattaagtaatagaggttattgtaataagtgattggagtgaaacagacatatttgcttttgctaggttctgttcctcctttcactgggaagcccctcacccagtccctcatcatgctctgctccaaaacacaccttaaccagaatccaacaatgttcatgttcaaaatgaaagacaaaacaaatattttcctaggcttaaaaatatgaacattgagagaatttttcctggcacaccagccctacaagaccaaagttgccaggtgcggtggctcgcgtctgtaatctcagcactttgggaggccgaggctggtggatcactagaggtcaggagtttgagagcagcctggcaaacatggcaaaaccctgtctctacaaaaaaaaaaaaaaatacaaaaattagctgggtgtggtggcacacgcctgtagtcccagctacttggggggctgaggcaggacaatcatttgaacccggcaggtggaggttgcagtggccaagatagagccactgcactccagcctgggacaatagaggaagactccatctcaaaaaaaaaaaaattattgagtctgtcaaaatccacaggaaaaagcagagagcaccatgcaagactatataagtggaaaagacaaactgaatatgtgtttcttcacctttctccttgttatggatttacaagtcaattgtgtaaagtaataagtagtaatggattgttaggcctacaacatagaaaaatttaacatacatgtattatatttataaataacaccataaaaactgaactaaatgactaccagtggaaaagtaataattataagaatatattgttgaatgtggaacactgagttgttacatatgcaacaaagtaccccagaaaggcaaaaacataatagagctatagaggacaaatatgtgtgtacatcactgaaatttaaccacatattactggagaactgagcctgattttgataaactaacatttacatgacaaacactagagtaatcactacaaaatcttagaacaaatgtaatgaaaaataaatcatcctacattggaaagatatactgggtgaaggcagaatttactgtgcttccttaattaaaaattgacttgggccaggcgcagtggctcacgcctgtaatcccagcactttgggaggccaaggtgggcggatcatctgaggtcaggagtttgagaccagcttagccgacatggtgaaaccccgtttctactaaaaaaaatacaaaaattagctgggcatggtggcatgcgcctgtaatcccagctactcaggaggctgaggcaggagaaatgcttgaacccgggaggcagaggttgcagtgagtcgagatcacgccactgcactccagcctgagcaacaagagttaaactccgtttcaaaaacaaacaaacaaaaaattgactctacattcattccttctaacctctaacacaggtaaaacctctaacacaggtaaaacctctaacacaggtacattcattccataacatatggggagaagatttccctcattcatctaacgtggaaatttccatgttatatatttccacttcaaccttgactctactactaaaatcaggaaattcttgtgcatgtcatgatctctttctatccatttcttcaacctctaacacaggtacagaattacaggttaatcatctctttttctgcattgcattttctcaattttctattattagggagatcttttccactttattatttttagtttgtgctacttaactttctcatattttggaagattagtcaggaacaaaacttttaagtggctcaattatgtgtttgttttgttttgtttgtttgtttttgaaacagggtctcattctctcacccaggctagagtgcagtgaaacaatctcagctcactgcagcctccacctcctgggctcaaacgattctcatgccttagcctcctgagcagctgggaccacaggcatgcgccaccacgccctgctttttcttttttttttctttgagacggagtctcactctgtcgcccaggctggagtgcagtggcacgatctcggctcactgcaagctctgcctcccgggttcacgccattctcgtctcagcctcctgagtagctgggactacaggcgcccaccaccatgcccggctaattttttgtattttttttagtggagatggggtttcaccgtgttggccaggatggtctcgatctcctgacctcgtgatctgcccgcctcggcctcccaaagtgctgggattacaggcgtgagacaccacacccggccttttttttttttttttttttttgagatagagtctcgctctgtcacccagactggagtgcagtggcgcgatctcagctcactgcaagttctgcctcccgggttcaagggattctcctgcctcagcctcctgagtagctgggattataggcacctgccaccacacctggctaatttttggatttttactagacagggtttcgccatgttggccaggctggtctcgaactcctgacctcgtgatctgcccgcctcagcctcccaaagtgctgggattacaggcgagagccactgcgcccaggcttttgttgttgttgttgttttggtagagacaggctttcaccatgttgcccacgctggtcttgaactcatgaactcaagcgatccacccggcttggcctcccaaagtgttgggattacaggcgtgggccaccgccttgcctggcctcaattatgtttatgaatgttgtgaagtagaaattaatattaccccttcaaataaacaggaaggtgttagcataccacacgggtccaaagtgagtatggttcagattgggaacaaagctgtgtggcagtagctgacctaagcctgggatcaaatctaaaggttgcctgagagaaacagggactgcgtaggaacaggtcttccatgaacacaggaaaatgaacaaacttagtgctgcagacaaggaggaatgtggcccagcgctgcttggtaagttcatggtccaagggagtctttgcacttctgtggcttttttttttttttttttgagacggagtctcacccctgtcgcccaggctggagtgcagtggcaggatcttggctcactgcaagctctgcctcctgggttcacgccattctcctgcctcagcctctctagtagctgggactacatgcacctgccaccacgcccggctaattttttgtattcttttagtagagacgggtttcaccatgttagccaggatggtctcgatctcctgacctcgtgatccgcatgcctcggcctcccgaagtgctgggattacaggcgtgagccaccgcacccggcccacttctgtggcttcccccccccgccattttctcatggtgccaaaattcacataagatagaatttaccttggctgggcacggtgactcacacctgtaatcccagcactttgggaggccaaggcgggaggatcacggggttcgagaccaacctgaccaatatggagaaaccctgtctctactaaaaatacaaaattagctgggtgtggtggcacatgcctgtaatcccagctactcaggaggctgaggaagaagaaatcacttgaacctgggaggcagagattgtggtgagccaagatagcgccattgcactccagcctgggcaacaagagcaaaactccatctcaaaaaaaaaaaaaaagatctacaggaaggagtttcaggccagcaaggtctggcttagctagctacacaatgcattagagcttcaagaacttgaagaacatgggagaattggccttggctgatgcaaaggaaacatcagcattcctagaaaagctcatgaaactcattaaaaaaaaaaaaaaaaaagaggctaacttccagagcaaatcctccattgtaatgaatcaggcatgttctggaagaggatgcccaattgtaccttcatcacaagagtacaaagaaagccttggggttcatgacttggaaagattgccttactctggtgctacgtggcaatgcagcaggtcataagatcaaacaaagcctcctctactaagtaaacaatccgtgggtccttgaaaacaaaagcgaaacttgcctgcccgtgtcctgacaaaaacacacgaggacttggttctaccactgcttcattcctgatgtgaatgaataccttgaaaagaaggggctgccactcaaggccctcctcataactgacaacgctcctggcatctctcttctctctgttatgccgataaaaatggggaagtgatgttcctgcctcctaaaactacatcactgctacaactacttgatcaaagcatcatcaagtgcctcaaggtgtcttacacccactggacttttggaaggatttatgctgtcttgataataaccctcaccatgtcatacaggatttatggaagagcttcccaactgcagaaacgattgtgtttattgcggaggctgtaaatgccctacagctcaagacagccaaagtgtgttggaagccattatggagtgaggaagtcaatgatttcaggcgcttctgcactatcgatatgatagtcagaaatatcttaaatgtaaggaaagttggtggggaaggctatctctgacacaagtgaagacaatgttgaggaacacacagaagagcaaagaagaaacctttactaacaaggaactagaagatatgctgaaatcctctatagatgatgatgatgatgatgtagatttagaagaggcagtgccgccaggcgtggtggctcacgcctgtaatcccaacagtttgggaggccgaagcgggtgaatcacctgaggtcacgagtttaagaccagcctggccaacatggtgaaaccccgtctctactaaaaatacaaaaattagctgggtgtggtggcgggcacctgtaatcccagctacttgggaggctgaggcatgagaatcgcttgaacccaggaggcagtgtttgcagtgagccgagatcgtgccactgcactccagcctgggtgacagagtgagactcagtctcaataaataaataaagaggcagtgccataagtggtggctcatgcctgtaatcccagcattctgagaggccaaggcaggcagatcacttgaagtcacagggagttcaaaaccagcttggcaaacatggcgaaaccctgtctctactaaaaatacaaaaattagctgggcatggtggtgcatgcctgtattcccagctacttgggtggctgaggcaggaggatcacttgaacttgggaggtggaggttgcagtgagctgagattgtaatcccagctcctcaggtggctgatgcaggaggatcacttgaacctgggaggtggaggctgcagtgagctgagattgcaccactgcacttcagcctcagcgacagagtgagactctgtctgaaaaaaaaaaaaagaagcagtgctatagattttgatacttgaaaaatctgaaggctgggtgtggtggctcaccctgtaatcctagtaatttgggaggccaaggcaggcagatctcttgattccaggagttcaagaccagcctgggaaacatggtgaaaccttgtctccacaaaaaacacaaaaagtagccaggcatcgtgatgtgtgcctataatcccagctacttgggaggctgaggtgggaagatcacttgagcccaggaagttgaggctgcagtgagccatgcactgtagggtgacagagtgagatcttgtcttaaaaaaaaaaaaaaagaaaagaaaaagaaaaaaaaagaaaaattggaagcagttttagggcacctacagcttctacaaggcgcaagtgttaaagattatcatcctcaattaagattcttccatggaacaaagcctccatgtcaccccagagattacatgctcacaaacgttgcaaagtttaaaaaaaaaaaaactagcttcctacaatgtttctaattaaatatctgcaaatatgaagacagccttcaatgcttaaagatcttcagtcctcaaattgaacagattctgacattagtattatttagactgctccaaaaattcagtatctgcagtcagaatctgtttcttccaatatagttgatcatgttgacatcctgtcaagattcgagttagcctgaggtctcactgcttatctgtggtgtcacacatctagctgactcaacacatcacaacattaggcacgatattgcaataatcatcattacacttttgttgggtgaatgttaacacattttcaggtcattaaacaaaagcaatctatgagtgttgaaagaaaagatttataatgctctaggtgacatgtattatgtgggtgggtctgtactgaatatgtgtagggtctttctcatatcatgattcactaaacaatataataacaactatttacatagcttctatgatgcatgatgtattttaactaatctacagatgatttagagtatacaggaggatgtgggtaggttacatgcaaatattttttattgttattatttttttgagacagggtctcattctgttgcccatgctagaatgcagtgatgtgattttgactcaccgcaacctcaacctcccaggctcaagcgatcctcccacctcagcttccctagtagctgggactacaggtacatgtcaccacacctggctaatttgtgtatcttctgtagagacagggttttgccacattacccaggctggcctctaactcctgggctcaagtgatccacctgtcttgggctcctaaggtgctaggattacagaggtgagcaactgtgtctaacccaaatatgtcttttctttctttcctttttttttttttttgtgtgtgtgacagaggttgttttgctcttgctgcccaggctggagtgcagtggcgcgatcttggctcaccgcaacctccgcctcccggattcaagtgattatcctgcctcagcctcctgagtagctgggattacaggcatgtgccatcacatccgggtaattttgtaccaaatatgtcatttttaaaaaaggacttggcatgtgtcgatttatgtatgcccagggggtggtagaaccacgctcctgcaaatattaggggataactgtatttgaaagaaactgaggcttaaaattaaggctttactatgtgtttacattcatagggtttatctccaatgagaattatttctatctgaaatgaaataacattaaagaatacttccctacatttcacacatttatagagtatctctccagtgagtccttttatgtctatgcaaggacctgagagaactcaatgcttttctacatttcttacattcatatgacttctctccagagtgaatcctttcatgtactttttttttttttttgagacagggtctggctctgtcgcccaggctggggtgcagtgcatcttggctcactgcaacccccaccccttgggctcaagagatcttcccacctcagcctcccaagtagctgggactacaggggcataccaccacacctgctactttttctattttttgtagagacatggtttcaccattttgcccaggcaggcctcaaattcctgaggtcaagcaatttgcccaccctaagtgctgggattacaggcgtgagccactgtgcccagcctcatgtacttttaagttaccaaaatgactgaaggcttccctacatattttacactcacagagtttttctgctctgtgagttgttttatgttgacaatggtgttaaaaaaaaatcgatcactttcccacattccttatatcatacagcatctctccagtgtgagatatttcatgattttgaaaggaataaaaattatgaaaggctttcccacatttacatttatagggtttctgtccagtgtaagtttattcatgatatcaaagggaactggaaatatagaaggctttataatagtttacattcatattgtttctctccagtgagtcttttcatgtctttgacatacactgggataaacaaaggctttcccacataccttgcatttattcggcccatctcccgtatgcattaccatatgtcttcgaaagcttgagctatgagataacgctttcccacactgcttgcattcatagggtttctctccactgtgagacttttcgtgtctttgacatacactaggataaacaaaagctttcccacatatcttgcatttatgaggtccacctccagtgtgcattatcatgtgtcttcgaaagcttgagctatgagataacgttttcccacactgcttgcattcatagggtttctctccagtgtgaattcgttcatgatatcgaactaaactgggacgatcaaagcctttcccacatatcttacatttatgaggtcgatctccagtgtgccttttcatgtgtatctgaaagcttccaagatgatgaaatgttttcccgcattgcttacactcatagggtttctctgcactgtgagtggtttcatgtcttcgaagggaactggaaacactgaaggctttcccacactgtttacatgtatatggtttctctccagtgtgagttctttcatgtcttatataggaactggaatcaggcaaggctttagaacactgcttacattcatacggtttctccccagtgtgcattctctcatgtcttcgataggaactgtaaaaaggaaaggctttagaacactgcttacattcatacggtttctctccagtgtgagttctttcatgcatacgtaataaactgggccaaaaaaaagctttcccacacaacttacatttataaggtctatttccaccttgcactaccatgtgtcttcgaaggtttctacgagaactgaaggtttttccacattccttacactcatagcgtttctttccagtgtgaggccttccacgcgactgaaaggagtgatggtaactgaaggctttcccacgttgtttatgtgtatgtggcttctctccatattcctgatactcatgtggtttgtgtccagaatcaactctgatgtggctattaagggataaatgacccattatgacttcttcacactcagcgctttgacatggatcttctccaggacaaatgctgttgttcacaatactatctcgaatgaggctaaatgtttctccacactgactactgtctttactttcactgaatctctctaccatatgacatctgtaaaaaatgagtagtacgttactaaatagttgtttctaaatgattatttatttatgtgtattaataggtattggatgtacttttttttttttttccctgagatggagtcttgctctgtcacccaggctagagtgcagcggcacgatctcggctcactgcaatctcttcctcccgggttcaagcgattctcctgcctcagcctcccaagtagccgggattagagaggcatacgccaccacgcccagctaattttgtatttctagtagagacagggttttgccatgctggccaggctgttctcgaacttctgacctcgtgatccacccccccttggcctcccaaagtgctgggattacagaagtgagtcactgcgcctggccagatatacctttttatcattaccatgcaaagtgtaggcttcatgccctgtttgaacatgaatgaactgaatgctatgcaagacaacccaacaccagctgggttttttttttttccttttctttttaattaattaatttattttttgaaacagtatcttgctttgtcaccaggctggagtgcagtagcagaacgatggttcatgcaaccttgacctcctgaactcaagtgatctacctacttcagcctcatgagtagctggaaccataggtgtgcaccaacacacttggctaattttttttttgagacggagtcttgctctgtcgccaggctggagtgcagtggcgcaatctcggctcactgcaaccttcgcctcctgggttcatgcaattctcctgccttggcctcccaagcagctggggttacaggtgcatacccccatgcccagctaacttttgtacttttgtagagacagggtttcactatgttggccaggctggtctcaaactcctgacctcaagtaatctgcctgcctcaacctcccaaagtgctgggattacaggcatgagccaccatgtccagcctcatatgtaaattcttataaaatgttttaggaggaaattttttaagaataaataaatttaggctggtgcagtgactcacacctgtaatcccagcatttggggaggccaaggcaggcagattgcttgagcccaggaattcaagaccagcctgggaaacatgccaaaaccctgtctctacaaaaaatacaaaaattaacgaggtgtggtggcttgcacgtgtagtcctggctactcaggaggctctggtgggagggtcacatgaacctgggaggtcgagtcttcagtgagccaagatcatgccactgcactccagcctgggcaacagagcaaggccctgactaaaaaaaaaagttaatttaaaaaattaaaaaataaatttaagctggacttgttcattttctttgtttttaaaatttccttttactctgagaatcacttcagaaacataactttctcctgtgagtgcaaattaccttagatttctcctaggatttttgtactgatcttcagtattctgttcttcccatatcattcctaaaagggagacccagaaaatcactatacattattagaaaattatataaaacagtaagattttatgtatactgcaatcatacatgattcgttcatcaaactacagttaattctgtacagtttgggggtggaggcagagtctcactctgttgcccaggctggagtgcagtggcacgatctcggctcacagcaacctccgcctcctgggttcaagcgattctcctgcctcagccttccgagtagctgggactacagatgcgtgccaccacaaccagctaatgtttgtatttttattggagacggggtttcaccatgttggtcaggctggtctcaaactcctgacctcaagtgatcttcccacctcagcctcccaaaatgctgggattacaggcatgagccaccatacccggccttacagttgattcttgaacaacacatgtttgaactgcacagctccacctacatatgaattttcttcagtctctgctacccctaagacaccaagatcaatccctcctcttacttagccttctcaatgtaaagataaggataaagaccttttaatcatacacttaatgaatagtaaatatagtttctcttctttatgattttcctatcaatattttctttctctagttcactttattgtgagaatatagtatgtaatacatgacttacaatatgtggattaatatggattaatcaacttttttttattattttattttattttatttttttgagacagattctcgctctgtcacccaggttggagtgcagtggcgtgatcttggctcactgcgacctctgcctcctgggctcaagtgattctgctaccttagcctcctgagtacctaggattacaggcatgcgccaccacgcctggctaatttttgtatttttagtagagatggggtttcaccacgttggtcaggctggtctcgaactcctgacctcatgatccgcccaccttggcctcccaacatgctgggattacaggtgtgagccaccgtgcccagccagtcaactgtttatgttaccagtaaggctgctggtcaatggcggcttaagctatggtggacaaaaagttagatgaggatgtacaacttctttcagggctgtcacctctgaattctgtgttgttcaagagtccatcatatgccctttccatatttcaaatcattgaacagcactgatgaccatgaaacaaatgtctgtaattgattaagtgaagacatggtatcatccttacttatacagtccaggttcctgatggtttcttgcatcacatatctgtataaattcttctgtgatggacccagcaaagcccattcctcctgggtgaagttcacagccacatcctcaaaggccactgcgtcctgaaacatcccacatagatagaggagaaaggttgagtgacagtactgaaaaaactatactcagttcataaacttcatatgatgctgtgctttccaagcatttattcaatgatgtagtaaactctctcatattctctttacactcactttctctcacacagccattttgatggtagaattcaacatgtttggtaaagttacagttgaataggaacaggtctcttcttggtgagttaaatgagtcttattgcctgcatcaccctaatgtctatttctgtagtaggttgtagttcttgtcaaagtcctactgacaaagtcctactacctattgtgcagaagagagctaccattagcagtcctgagactgcatgtccttacaaattcttattctcaaagttggaccttttatggtgtctaggaactggatttagggagtgccccaccaatgtaactaataacagagctcgattgtatctaaactgtttgtgcaaaaagtacattattttcttaactcctatgttctgagagtttagaatcttacaaactcagcagagggagtgtatgtgatcagccactgctgagtttgaatggttgtcccctccaaaacacatgttgaaagttaatccgcaaagtgggagtaataaaaggtggggattgaaaaggtgattgagtcttgaaggttcagagctcatgaatagattaatgtatacatggatcaatggcttaatgaataaataagttatctcaggaaggggactggtgtccttataagatggaagagacccgagttaggcactccggcccttgccatgtaatgctttatgccatctaagaactctgcagagtccccaccagcaagaaggttctcaccagatgcccagccttaaccttggacttcccagcctccagaacagtaaaaaacaaatattgttccttataaattatccaggttcagattattcttaagcaacaaaaaacagactaagccagccaccaaaaaacactataggcactgggtctctaatgagagaccctggtagataaaatttcacatgtttttttgcaactgattagttggaggattcggcacatcctctgggattatactaacagaaaatctggaagctggtaactggtttcctctagaccaaatgtagttaagcatgacaaataaataataaaagatatttcaccatcccaatggaaaatttttgaacatcttattgggtaatgtcaaaggagaaggaaagaaggtcaatgagagaatgtaatattagaaaagaactcaatgttatctcttatgaatatttataaaattccctaaataactaaaacagacctaaataaccaaaaatttcactaccagctaggtaccatggctcatgcctgtaatctcagtactttgagaggccagggcagatggaccatttgagcccaggagtttgagaccagcctgggcaacatggcgaaaccctgtctctgcaaaaaaatacaaaaaaattagccgggcatggtggtgtgcctgtagtcccagctaattgggaagctgaggtgggaggatcacctgagcccaggatgtgaagactgtaatgaaccattattgagccactgcattctagcatgggtgatacagtgagactctgtctcaaaaaaataaataaaattacattatcaaatctaatagaagtcacaaatgtctaaaaatgctaaaaaacctcctcactggccgggtgcggtggctcacacctgtaatcccagcactttgggtggctgaggtgggcggatcacctgaagtcgggagttcaagaccagcctgaccaacatgaagaaaacctgtctttactaaaaatacaaaattagccaggcgtgatggcgcatgcctgtagtcccagctactcaagaggctgaggcaggagaattgcttgaacccaggaggcagaggttgcggtgagccgagattgcgctatcgcacttcagcctggttgacaagagcgaaactccgtctcaagaaaaaaaaaaaaaaaaaaaaaaaaccctctcaccaacaaagtgacagctttgcaaaaacagataaaggattttgaaactataatattcagcaccccataccattaataaagagataaacaaatagataaataaaagtgaaaaaatggtagaaaacccttatggagtttttatttgtccttggcccaatcacaccccacctctgcgccagtcttgaagacagcagcctgagatcccagtgaggaactctggtcactaattctagagaaagcagatcagatgttattcacaaattattgcctttgtattttccagtcattatggggatgatcagaaggtgtgaaataaggctgtcttttctatttcatctacaatggaatccagttagggtcaaacataagaaatgctgaaaaatggtgcaaaatacacaaatagcctgcaactacttgagacagcagactgtaattaagacatacattaaggccaggcacggtggctcatgcctgtaatcccagcactttgggaggccaaggcgggcagatcatgaggttaggagtttgagaccagtctggccaacatagtgaaaccccgtctctactaaaaatataaaaattagccacgcttggtggcgcatgcctgtaaccgagtagctgcagcaggagaatcgcttgaacctggcaggcagaggttgtggtgagtcgagattgtgccactgcactccagcctgggcaatagagcaagactccatctcaaaaaaaaaaaaaaaaaagacatacattagcccacctaagtctaaaaggaaaaaactggagagaaaatttccttcaggaattagggtattcaaaagcacccattatattgtggaactgagagagccacatgcactcataggaaagaacatattttcatagaagatgtgaggagacccttattttcagctctggcatgtttctaggtttagtaaaacagaaagtaaatgctacagcagagttttaaacagccttgctaagtgttcaaggaattgctccacaagagccatccacaaagactggaagaggtcaggtttttgtatgtttcatcttccttcttacttttagcttgtagcattcaggaaatctctatcagaacacaaatgaacacaagctaaagaacagagacttcagtgtgtacatcagatagggaatagagtctctgcaaacacactttgaaaatgttactaaacaaatgaatagttacagccttcatcaaacaagaacagcaaacaatgaaggggacagaatctgatttccagatgcaaatgtctacttttcaatgcacacaaaattaggaaaaatagagagaaacatgaaaatatggctcatcaatggaaaaacctgaactgagataaaccatctctaagaaacctcaaacattggacttcttgaatgaataaaaactttaaagcaactgtcttaaatatgttcaatgaggtgaggcaatgatgaagaaaaaactaaaagaaaatcagaaaatagatttaaaaaatcaataaaaattagaaattgagcaatatagaactaatgcagctgcaaagtacaacaatcaaaaggaagacttcactatagatgttccacagatgtgaacaaccaaagaaaaaaatcagaggccaggtgcggcagctcacgcctgtaatcccagcactttgggaggccgaggggagcggatcacttgaggtcgggagttcgagaccagcctggccaacatggtgaaatctcgtctctaataaaaatacaaaaattagccaggtgtggtggtgcatgcctgtaatcccagttactcaggaggctgaggcaggagaatcgcttgaacctgggaggtggaggttgcagtgagccaagattgtgccactgcactccagtatgggcgactgagactctgtctcaaaaaaaaaaaaaatcagctaaaatcaagataaaacaattgaatctacccattcacagaagcgggaaaggtcaggggatgaaatggaaaaaatgtgtgactggtatacctgccttgccagtaacgttaaaagaagtttattagagaaaagagaaatgacacaagttagaaattcacatcacattaaatgaagacataaaaaatgatttacttttcttatactttcttgatctaatagatatgtttgctcaaaataatagtatcaacaatgtattgggtgttataggtcacaattgtgcaaatgaatgacagtgatgattcatggaatgaaaggaagaagtttcaaacagtttattataccagcactacccctgaagccagtatagtgttttttgaaactgaaggtccattagttgtgaatggtataatatgtatcctatggaattcactaaaaaaattaagaaccaagtactatactaataggataagaaaatcatattctgctcaactaaaatcaaagacggaaatagagaggtagttgagctgggtgcggtggctcaagcctgtaatcccagtactttgggaagctgaggcaggtggatcacaaggtcaggagttcaagaccagcctggccaacatggtgaaacctcgtctttactaaaaatataaaaattagctgggtgtggtggcgggcatctgtagtcccagctactcgggaggctgaggcaggagaatcgcttgaacccaggagacggagattgcagtgagccaagatcgtgccactgcattccagcctgggcgacagagtgacactccatctcaaaaaaaaaaaaaaaagaaaagaaaaagaaaaaaagaggtagttgaaaaaacagacaagtgcaacaaatagaaaacagtaatatacatatacatattaattcaattatgtcaattactacattaaatgtgtattatctatatttaccagtaaaaaagacaaggactggcagagtagaataaaaatacaaagcctagcaatgtgtacataaaaaacattttaaacagaaagacagagatacattaagtagagaaatatatgccattctagccctaatcaaaaggaacatgaaacagctctattacattcagacaaatcgggttttagattaaggaaaattataaggcatagatagtgagttcagaatgataaggaaagtcaatcctacaagaagacataataatccttaatatttatgcccataaaatagaggatcaaaatacataaagtaaaaaattacaaaaaccacaaggcaaaatacacacatctacaattatagttggagggaaacaactcatctctatcaataattcacagatcagtttgtcagaaaatcactaacgatatggctgaaatcaatagcactattaatcagctggatttcattgatacgtgtttacagaatccttcattcaacactagcagggtatatattcttctcaagcccacatgaaatagtcaccaagatgcacaaaattctgagccataacacacactagaacaaatgttttaaaatagaaattccaggccaggcatggtggctcacacctgtggtgccaccactttgggaggccaaagtggaaggattgcttgaggccagactgagcaacatagtgagaccttgtctctataaaagtataaacattagccaggagtggtggcatgcacctatagtcccagataatctgaaagttgaggcaagaagattgcttgagcctaggagttggaggctgcattgaactatgatcatggcactccacactaccagcctgtgtgacagaccaccaccctgtctcttaaaaaagagaaaagagctgggtgcggtggctcatgcctgtaatcccagcactttgggaggccaaggagggcagatcacctgaggtcgggagttcaagaccagcctgaccaacatggagaaaccccgtgtctactaaaaatacaaatagccgggcatggtggcacatgcctgtaatctcagctactcaggaggctgaggcaggagatcacttgaacccaggaggtggaggttgcggtgagccgaaattgtgccactgtacttaagcctgggcaacaaaagtgaaactccatctcaaaataaataaataaataataaataaataaataaaagaaattatataaaatatgtaatcagattataaaccaataacttaaatatagttgaaaagtctcaaaaaagtggagatttaagccacaaatttctcaagtacacagatgtcaaagaaacttgtcacatgaaatgcaaatattatggtgctgatgaaaaaggatatattttagcaaaatctctggaatgcagaaaaggcagtgctttgagggaaacttaaagaatcgaatgcattctctagaaagtaaaactctaaaatcagtgctctaactttccatcttaggaaactagagaatagcaagattaatgtaaatcaagcagaggaaaataacaatgggaagagatattaatgaaatagcaatcaagaaatcaatagaaaacatcaacaggctgggcgcgttggctcatgcctgtaatcccagcactttggaaggccaaggcaggcggatcacgaggtcaggagttcgagacctgcttggccaacatggtgaaaccccgtctctactaaaaatacaaaaattagctgagtgtggtggcacatgcctgttaatcccagctacttgggagcctgaggcaggagaatcacttgaacccgggaagcgcaggttgcagtgagctgagatcacaccactgcactccagcctgggtgacagagcaagactccatctcaaaaaaaaaaaaaaaaagaaaagaaaacatcaacaaaccaacagatgattctctgaaaagatctgtaaaactgataagccgacagcatagttaacacagaaaaaagagaggccatcactactaaccctatggacattaagagtgccatgaaagaatattaggaacaactgaatgcccacatatttgataaattacatggaatggaccaatttcatagaagacacagtctaccaaaactcataaaagtaacatcaagtaatatgaataggtctatatctattgaataaattgaatcaataaatgataaatatcccaagaaaaaggaacagaccaggatgatttcactggtgatttatggcaaatacttatggaagaaatgatcccaattctctacaatatcttccagaaaacagaagtaggtaggtaggtaatactttcttttcttttcttttcttttttttttttgagacggagttttgctcttgttgcccaggctggagtgcaatggcaccatcttggctcactgcaacctctgcctcccaggttcaagcaattctcctgcctcagcctcccgaatagctgggattacaggcgcctgtcactaagcccagccaatttttgtattcttagtagagacgggcttccccatgttggccaggctggtcttgaactcgtgacctcagatgatccatacacctcggcctcccaaagtgctaggattacaggcatgagccaccacgcccggggcagaggtaatactttctaattgatgttataaggccaacattgccctagtaccaaaaatagacagacattacagacatatctccaccactgaggacataaggggaaaactgccatctttaaacctggaagcaggcccttaccagagatctgacctacttgaacttggattcccagcctctactgagaaatgaacaactgttgtttaaggcacgtagtttatggcaatctggtatagcaatcctacgtaattaagacagggaagcgctttctctaccacacatcaaggctttgaagtctacagtaatcaggagagtatggtgttagcaaagtgatgggtacaaagtccaatggaagacagcaaattctggaacaagagcatctatttaaggtatgagaaactatggcacagcaggtattgccaggcagcgatacaaatgacagctacttcaacccaaagaacagggacaaattgttatctccagaagaataaccaatcttctgcctaacacctccatatacaataatcaactaattacagacctgcctgttttcatgaatttttattcactctattacctcagcttccattttgaatgtggttctctacctttctcataccagaaaaagtattttaagagccttgagacagtattcatttttctgtagtcatcatggaagaaagttttttccaatttattttccctgatggcattttctctgctaagccctgaaattctattgagatgatccaattaaaaacaaaacaacagcaacaacaaaaaaacagacctggaaaacttactacacaggctctgtgtagtacgacagaaaagaaaagtaaacaagaattttttaaaggcatataggactagatatatgtaatttgttttctgaaatccaactctttcttgtccctttagaaacatcttctctatcaatctctaatgatagaatgcattttacagctaagaaaaaactgaacagaaatgagtgaacaaatcttttcaaggttgacaacctcagggaggggcagtgctgactggaacacagacaagtctcattcaagggtcaggtcaggtcctcctgtcacctgggacatcccccacccccgtgctgctcactgaagtgctcagtgactactccctacccccaaccaccagataccgcactgtgtactttcaggctcttacaccacctcactggggtaagttatctttgacctttcggatagtttttcttgcttcactagtctaacagaattcaaaggatgggaatcatttctattttaccccctcaataccagcacctgagtggctgaccagccatgtctccaagaaatgaaaactgggcttggggtgagaaaactgagtatcccagggcttaactttttacaagaggataccaggggaatcctcccaccacagggtatccagctcttcccctgggaggccccagccctgcatctcaggctgtcctctgggaggagtggcccaggggctgatattcactaccctccaagacaaggctgctgtatccacttggtgccagtcccaggcagttatcaaagccagtaccaggaaaagatagtgtgggctcaggactcatcagctggtggtttccaaaggggaacctcaacccaaacacttccagataaggtgcctgtgcccagagaagataaaaggagaagaggcgcagacatttttcttgttggtttttacagcagagtggttaaaccacctgacaggtggttattctctgcatcctcacatatgaaatattcacaaacaaaaatcatatcttctaaaaaagaatcatatattgctacctggggaaaaaaatgacagttaaaatactgtatttgtttgaaatacagcctgggggacaaagagttcattatgttgctgtgaactgaggacagtgtagagtcttaattagggaaaaggctaaggggaacaggggaaaaggctgttaaattaaagtcttaattagggaaaggctaaagggaacaggggaaagcagaaagataaaacaaaaaagctataaatctgcctatcttcatgtgcagagaatttaaacaaaagagaatgcaggtaagttacgggtctaactttgttttttttcttttttctttttttttttttttttgagacggagtctctctctgtcgccggcccagactggagtgcagtgacgtgatctcagttcactgcaacctccgcctcatgggttcaagcgattctcctgcctcagcctctcgagtagctgagattacaggcatgtgacaccacgtctggctaatttttgtatttttagtagagaaggggtttcgccatcttggccaggctggtctggaactcctgtacatgtctaactttctttatggcccaagacatggccttcttgcccagataacgcacttaattcacagacttcctgctcaccatcaaacgcctcaatttatcaaacaccggggctgacagaggaatgcaagttaagctccctgctgccttggcactctgctgccttggcactatcaatcagcccaagttccattctataaaatcacccacaagcctctgcttctctcctgcaggcttcccatggcctcccttgcgatggattttgcttctttcgctaataactttacctacaactgtcttagtaaaaattattttaccccggcgttaccggcccagatagcagtcgttcccctgtgacggagaggaagtcagctttatgaaatgcagggcaaaatctggaaatctagggatttactgccagccccaggagttagggtgaggggacaagataagcattagacatctgccttcccaaacctttgaagactcagagggacaccggtcccctttaggaagaaaacagagactgaggatcccacagatcacagctcctcacaggcacgaaccccacacacgagtggggattccctccatgacccttccgtgaccctcccccaatcctggggagatggggggctgcgggcgaggagctgcccagacagggctccgaggccgggaccgcagttgccgcgcagggaccggataggacgcccggggtcccggctgccagctcagcctcactctgtggctgaggggaccgagggtcgagctgcgccagggggactcgggtcccagaccccggagctgacggcgggggaggcccacgttcgccgcggccggttctggacggttccaaccagctctttcccacttttgggacgcctgaccctgcacacgcaccatttcccggcttccgggatgttccagggtcctccctctgcctcccgctgccagtgcgggtcccactgtgacagaggctgccacagacgttccagggcgtctctcagcgactgaggctacacagacgttccagggcgtctctcagcgagcgactgagtctagagctgagcgcaggggcgtgaagacgccgcgggctctttgaacctggcaccctactgccagccgtgcgcctgattgacagttctcacgaccccgccccatagctctgattggatagggctccaggtcccgccccctgggcactgagtgacagaagaagcgatcacacagtgctgagtcgagcgggatgaacgagttccaggcacagcccttgacagggcaggcttcctccctgtgctgtcctgatccctcccagggaacatttgcatttatgcagaattacctgcccgtactcagcaggcccttactgccttttcctcctggagaaggagtcacaagtgttttgcagggaatcccagactcacagtccagtggagccattcccctggcctcagagcagaggggagcccaaggccacacaggccacactgcagcaggagggtggcctgatgtccaccgggcatcaggatttgaggatgagactcttggcggcaaggttaagccttcctctctcaccttgcctctcaatctgctcattttcagccaaggaaataaaaacaagtcaagaacggtattaaaatatcaaatgtgtggaagaactgaaatcacacggcagcaataaatgaatgaatgaatcaaaacaaaaatacaacaggaaaaaaaaagcaaaaacttgaactagtgcagataagcagcctgctgccctcatacttcagcaaacgtcccattcaggaggctaaacatatgcccaaacttggcagccactcttaactgttgaaatggaaccccagagtgaaccaaaacctggtgatgagactgggacactgaaggatttgactctgggagctcaacatacttccctgtgccctctgcagagtgtggaaatgcccccaccgtcaagatgtgcattttcaccaacaggaaagtttcatgtaaagttagtttaagggcccggggcggtggctcacgcctgcaatcccagcactttgggaggccgaggcgggtgaatcacctgaggtcaccagttggagaccagcctggccaacatggtgaaaccacatctctactaaaaatacaaaaattagctgggcatggtggcgggcacctgtaatcccagctactcgggaggctgaggcaggagaatcacttgaacctgggaggcggaggttgcagtgagccgagatcgtgccacggcattccagcctgggtgacagagtgagacctggtctcaaaaaaaaaaaaaaaaaaaaaaaaaaggttactttaaggtactgacctacataaactgtcaaattcataaaccctttacccagattttcctaacacataaatggtaaattctgattctatgtgcagcttcgtgctacgtggaggcgtgcgcaggctgctgaggaagcaccaaagggggctccatttctctccctttgcagccttcagaatgggctcggtgtagagtcactggttcaaactctgctgcccactccaggtggctggggctcagaaaacaataccccaaaaagaagaccttggaagaagcctcagaagcaaaagttttttctccacagagggcagaggaaaaacttagtcccattcttgggactcttagtcctactcttctatccaaggctagccttagaaactagaatctctcttctccaaagtgggtcgtagaatccagaacccttttcccctaaatccaggcataaaatcaaaacatactactctaactttccattgtcctttctgtgtaaaaactggccataagcaaattaactgtccaactttgtttgactgcaggtcagggtggccctggggcttccctgggccacattggaagaagatgaatcgtcttgggccacatataaaatacactaacactaacaatagctaatgagcttaaaaatatatagcaaaaacaaaaattcctaatgttttaagaaagatcatgaatttgtgttgggctgcatccaaagccttcctgggccatgggttggacaagcttgctgtaggtcataagaccctccatttcagagtgggtcctgcctcatactgagaaggaaggaatgcatgctcagaaaggccaagaacaatctagacacacaggccttgttgggtttccccactcagtctgttagcattggatcatactctttcaatctaatcacatttctacacggctgtccatacattaagcctaagcattaaaatgaacaatttcctttgtatctctgggtcttcattctgaagcttcctggatatacgcgttaaataaaatttgtatgcttttcctccaattaatctgccttctctccaattaattcagcaaaacatcagagggcaaaagggaatgttccccatggcctctgtaagagtcttcacttgcttctcaccagcactgatgagttaattgaaacaaagaccctcaattccactgtttgaataaaaaattgacaatcttgggtttcttcctgtgtctatatataaagtagtggaaaaaatatatataagatatttaatagggatttggaaactggtaaatggactgggcatggtgccttgggcctgtaatcccagcactttaggaggcaggggcaggaggattgcttgagcccaggaattggagaccagtctgggcaacacggggagatcttggttcctcaaaaacaaaacaaggccaggcgcggtggctcacacctgcaattccaacactttgggaggctgaggcgggcagatcacaacgtcaggagttcaagaccagcctgaccaacatggtgaaaccccgtctctactaaaaatactaaaaattagctgggcatggtggtgcgtgcctgtaatcccagctactcaggaggctgaggcaggagaatcgcgtgaacccaggaggtggaggttgtggtgagctaagatcgcaccattgtactccagcttgggcgacagagcgagactccgtctcaaaaacaaacaagcaaacaaaaccaactggtaaataattattctgttgagaaacaaacatgctaacaaactattatttttaccttagcaaactgttgtgtaaaacaactaattaaatgtgagctctcctctctccttggcttcagtcactccctgaccttcatagctcagggttgacatcatgtgctctgtgcctggggatggacatgtcccatttatccatctgaaaccccctctcaaccccagcccacaccattgacccaaacagtcatatctgtatctaaatcctaagtattgtacaaatacattttccttttaagcaaactggcccaggttgaattcacctgtggttctcatgcccacagtttcatttattcatttgaaacagtcttctcagatagtaatgtcttgggtgaggacacatccattttatttgcttctgttcttcttaacctgtgtcactacctgctcagtgagggcacagacagaatattctaagtgactatcagctgctgtaaatactggaggtctcagcacaaccctgagaaatccgcaccagagaaaggatgtgtgaataatattaatgtcaccccttaccacaacagttagcttatttctctctttttttttgagacgagctctcgctccatcacctacactggaatgcagtggcaccatcatggctcactgcagcctcaacctcctgggctcaagcgatcctcctacctcagcctcccgagaggctgggactgcaggcatgtcccaccatgcctggctaatttttgtatttttttgtaaagatagggtttcaccacgttggccaggctggtctaaactcttagactcagatgatccacccaccttggcctcccaaactgctgggattacaggtgtgagccacgctgtctggccattttattttcctttctggaaaaaggcttttaaaaatggttttccggttttctggggtactttcatacacagcaatacagatgataaaagtaaacataacaccattcagtttggtttcatttatatgatttaacttttcaacagttaagaaaccaaaacattctgtcaaccttaattggatttccctgaatctaaaaagtgccaggaaaaaaattctacaaataaaaacatgtaagagtcactgaggtggtatgaagaaccctgagaaggtgacatttaatgtgagacatgaaataatatattagtgtaaaaactcagggcaaagccaggtgcagtggttcatacctgttaactccgccctttgagaggccaaggctagaagttcaagaccagcctggggaacagagtaaaaccaccatgtctaccaataaataaataaataaataaaaattagccgagcatggtggcatagaactgtagtcctagctattcaggagactgaggcaggaggatcacttgagtctaggaggtcaagactggagtgagctatgatcacactgctgcactccagctttggcaacagagtgagacactgtctaaaaaagaaagaaaggaagaaaacaaacaaacaaaaaaccctcagggcagaggattcagggtagatggcagggtaccaagcataaagaagctgtctccccacctagacaacagttttactggcagaatctgtctgatggagctattttatttattcttattttttgagacagagtcttgctctgacgcccaggctggagtgcagtggcacaacctcagctcactgcaacctccacctcctgggctcaagtgattcttgtgcctcagcctcctgagtagctgggattacaggtgtgtaccaccacacccagttaattttttgcatttttagtagagatggggtttcgccatgttggccaggctggtcttggactcctgaactcaagagatccacctgcctcggaaagagctgggattgcaggtatgaggcaccacacccggcttgatggagctattttaaaacactacagttggccaagcgcagtggctcatgcctgtaatcccagcactttgggaggccgaagtgggaggatcacctgaggtcaggagttcgagacccacctgaccaacatggagaaaccctgtctctataaaaatacaaaattagccatgcatggtggcacatgcctgtaatcccagctattcgggaggctgaggcaggagaatcgcttgaacctgggaggcagaggtcgcggtgagccaagatcacaccattgcactccagcctgggcaacaagactgagactccatctcaaaacaaaacaaaacaaaacaaaacaaaacaacacactacagtctattgaagccttgaaaattccagaaaatgatttggatggtaaactgtggttaattgtggccatttcaacattcagcataggaccagctggacttctccccactacctctgttgcaggcagccatgcacatgtattttcctccagtttggcagtggggtctctcaggagtttggctatgaactctagtgctgccatgatggggctccaggacatctcgttgtgatgtttacagtgtgctttccacaggacacttcattctggtgaagggactaatgtttaaatgtcaatcagtgaccaggtgtccctcacaggaaacttggtggttatactggccgatgtccttgtggctcttgtctgacatgcatccagttgatttcttttttttttttttttttttttttgagatggagtctcgctctgtcacccaggctggagtacaatggcgtgatctcagttcactgcaacctccgcctcctgggttcaagcgattctcctgcctcagcctcccgagtagctgggattacaagtacccgccactacgcccggctaatttttgtgtttttagtagaggcggggttttaccatgttagtcaggctggtctcaaactcctgacctcaggtgatccacctgcctcagcctcccaaattgctgggattacaggcatgagccaccatgcctggccagcatctagttaatttctatcaaaatagccactctatacagagccttgacctggaaataagttggaattaggtgtagcagtcaggtgagacatgtaggagggcattgagcaggccaatatatgcactgtgggagcttcagaaggagaagagagagagagaaggtgaagggagaatattttgagaaataatggaagaacacattctaaattaagtgaaagccatggatgtagacatccaagaagctcaacgaactctaagtaggatgaatacaaagagaaacgcataaatgcacattatactaaagctgtcaaaagccaaggacaacaaagataatcttgaaagcagcaaaaaagaagtgattcatcacatataaatgatccttcataagatcagtagatttctcatgagaaatgttggagaccagaaaatagtgggcagatgttaatcaaagtgctaaaagaaaaataaatgtggccaggtgcggtggctcacatctgtaatcccagtactttgggaggccgacatgggcagataccttgaggtaaggagtttcaggtcagccaggccaacatggcaaaaccggtctctacagaaaatacaaaaattagccaggaatggtggcatatgcctgtaatcctagctactccggaagctgaggcagaaggatcacttgaacccatgaggcggaggttgcagtgagccgagatcatgccactgcattccagcctggggaacagcgtgagactctgtctcaaaaagaaaaaaagaagaagaaaagataagaaaatgtaaccaggcatatagtcacagctactcaggagactgaggtaggaccacttcggcttaggagttcaagatcagcctgggcaatatagtgagaccctatgtcaaacataaaaacaaaaacagtcagctaggcatgatggctcatgcctgtaatcccagcactttgggaggacaaggtgggcggatcatttgaggtcaggagttcaagaccatcctggccaacgtggtgaaaccctgtctctactgaaaaaaatacaaaaattagccaggcgtggtggcgcaagcctgtagtcccagctactcaggaggctgagacaagaaaatcactggaacctgagaggaggaggttgcagtgagccaagattgcaccactgcactccagtctgggcgacagagtaagactccatctccaaaaaaaaaaagtcaactacgaatctaatatctgtcaatactgtttttcaaaagtgagaaaaaaattaagacttgcccacatgaaaaaactgaggtagttttaaaaattattattagatgtgctctgtgagaaatgtagagtattttgcagtttgaaataaaagaacactgggaaaaaaaaaaagaaaagaacactggatggtatctggaaggtgtaggtggaaataaagatcttagtaaaaagaaatacatggacaattataaaacctattatttttatttatttatttgggacaaggtctcacttccattgcccaagatgcagtgcagtggcacaatcttggctcaccgtagcctcgacctcctgggttcaggtgattctcccacttcagcctcctgagtagctgggattacaggtgcatgccaccaggcctagctaattttttgtatttttagtagatctgcggttttgccatgttgcccaggctggtcttaaactcctgacctcaaatgatccgcctgcctcagcctcccaaagtgcttggattacaggcatgagccactgtgcccagccttaagggctttcttatcattgattactttatatgaaaatgaattaaactcaccaataaaaaggcagagataagcagaatgggtgaaaaatatgatccaactgtattctgcctactagaaactcattttagatctcaagacacaaataggttgaaagggagggcatgaagaaaaatattccatgcaaatagtaatccaaatagaacagggggggctacatcactatcatacaaaatagaatttaagccaaaaactgttaaaggagacaaagaagaacactatttataaaagagtcaatacatacagaatatacaacaattattaacatacttgcactaaacaacagaggcccaaaataaattaaacattaacagaaatgaagaagaaatggagagttccacagtaagagtttgagacttcacactacattttcaagaatggatagaataatcagatagaagatcaataaagaaatgaaataacttcaacaacacaataagcaaaacagacagacataatgacatatacaagcatactccacccaatgacagtagaatacacattctggtcaagtgcacatggaacgctctctaagacagaccataattaggacataaaacacaaaaggtcttcatacaattctaaaaactgagataataagatgtatctttttctttttgagacagggtcttgctctgtcacctaagttggagtacagtggcatgaccacagttcactgcagccttgatttcccaggcttaaataatcctcccacctcagcctcctaagtatttgggaccacaggctggagtgcatgccatcacacctggctaattttttcaaattttgtagagatgaggtcttactatgttgcccaggctggtcttgatctcctgggctcaagcaatcctcctacctgggtgtcccaaagtgttgggattacaggcatgagccaccatatctggcctcagatgtatatttttcaaatacagtgaaataaaactataattattggaaaaaaatacacaaataagtgtaaattaattcattcttcaacaaccaatgggtcaaatgagaaattgcaatagaaaatactttaaggccatgagactctgtctcaaaaaaaacaaaaaaaaaagaggttgggggtggtgcctcaaacctgtaatcccaaaagtttgagaggccaagatgggaggattgcttgagaccaggagtttgagaccagcctgggcaacatagtaagactctatcgctacaaaaaaaattaaaaaatcagccagacatgcacatgcacctatagccccaattacttgggaggctgtggcaagagggtcacttgagcccaggagttggaggctgcagtgagccctgattaggccaccacactccagcctgaatgatagagtgagatcatgtctcaaaaattaaaaaaaaaaaaaaaggaaaagaaaaagagaaaataccttaagaccactgaaaacaaaaatctaacacatcagaacttatgagatgcagcaatggcagtgctaagagaaaattttatagctttaaatgcattaattgcctgggtgcggtgggttacacctgtaatcccagcactttgggaggccgaggcgggtggatcacgaggtcaggagttcaagaccagcctggccaacatggtgaaaccctgtctctactaaaaatacaaaaacttatccaggtgtggtggcaagcacctgtaatcccagctacttgagaggctgaggcaggagaatcgcttgaaccggggaggtggaggttgcagtgagctgagatcacgtcactgccctccagcctgggtgacagagcgagactgtctcaaaaggaaaaaaaaaaagcattcattgaaaatgaagaaagaactccaataagtattctaattcttcagtttaaggaactagaaaaggaagcgcaaacttctttaaaaaggtaggagacaaactgggtgtggtggtacattcctatagtcccagctgctcaggaggctgagggaggagcattgcttgaacccaggaattctaggctgtagtgcaccataatcaggcctgtgaatagccactacactctagcctaagcaacatagcaggaccctgtctttaatattttttaaaaggcactacaaagaagtaaataataaagagtagagcagagataaatcaaaagagaatataaaaacaacagacaatattattgacaccaaaagttggtttgtggaaacaaaatggaagaagaaacaagttctaattcattttgtgaggccagcctcactttgagatgaaaggcaagaaaagacattacgagaacagaaaaagactacagaatatcttttatgaatattgaagcataaattctttttttttttttttttttttttgagatggagtctcgctctgtcgcccaggctggagtacagtggcgcgatcttggctcaccgtaagctctgcctcccgggttcacgccattcttctgcctcagcctcccgagtatctaggactacaggcacccaccaccacgcccggctaattttttgtatttttagtagagatgggtttcaccgtgttagccaggatggtcctgatctcctgacctcgtgatccgcccgcctcggcctcccaaagtgctgggattacaggcttgagccactgcgcccagcctattgaagcataaattctaaacaaaatactggcaaatgtacttcagcagcatatttaaaggattataaatatggaatttgttggccaggaacagtggctcatgcctgtaatcccagcactttcagaggatgaggtgggcagagtgcttgagcccagcaattcgagaccagcctgagcaacatggcaaaaccctgtctctacaaaaaatacaaaaattagttgggtgtggtggcatgtgcctatggtcccagctacccgggaggctgaggcaggagtatcacctgagcccgcaccactccagtccagcctgggcaacagagtgagacattgtctcaaaaaaaaaaaaaaaaaagtgggatttattcccagaatgcaaaagtggttcaatatacagcaatcaatgtaatgtaccacattaacgaagaaaaggcaaaaaacacatttatcatctcaaatgatacagaaaaataatttgacaaaattaaataccttatgttccttttaaaaaatacatttgataaaccaggaatggaaagaaacttccttaataggaaaaaagtcacatatgaaaaacctgtaggtaacatggtcaatttgaaagactgaaagccttccctctaatatcaagaagacaggatgcccactttcaacagttctattcaacatactaatggaagttatagctacagaaataaggtaagaaaaagaaataaaaggaatccaaattggagagaaagaagtaaaattatctgtgtttacagattacatgattctatgtggagaaaacactgaagactccacaagggaaaaataaaattttacagcttataaaacaaatgcagcaatgttgcagaatataaaatcaatacacaaaaatcagctgctaacaatgaataaacaatagactaacaatgaataaacaatccaaaaagaaaattaagaaaataattttagttataaaagcatcaaaaaaagtaaaacacttaaaaataaatgaaaccaagaaatcagtgatgtgtacattgaaaactacaaaacattcttgaagcaaattaaggaagataaatgaatggaaagatatcccatgttcatggattccaagacttactattgctaagattaaaatactaccaaaatcaatctacagaatcaatgtgatccctatagaaatcctaacagcttcttatacagaaatagaaaagcctattctaaaattcacttcaaatctctagggatctctaataccaaaacaatcttgaaaaagaacaatgttgaagaattcacactgccttatttcaaaacttactacaaagctacagtgatcaaaacagtatggtactggcataaagacaaacagataggccaatggaatagagtagacagcctagaaataaatgctcatatacagggtgaaatgatttttgacaacagtgccaagaccgttctttggtagaaggacaatctttcaaaaaatggtgttgggaaaactggatatctacatgcaaataataaaagtgaaccatcacattacatcatgtataaatagtaacttatatttaatcaaagacctatacttaaaagctaaaactataaaatacttagaagagcctgggtacagtggctcatggctgtaatcccagcactttgggaggccgagcagatcacttgaggtcaggaattggagaccagcctggccaacatggttaaactctgtccctactaaaaatacaaaatttagacaggcgtggtggtgggtgcctataatcccagctacttgactacttgggaggctgaggcatgagaatcacttgaacctgaggtggaggttgcagtaagtcaagatcatgcctctgcactccagcctgggtgacagagggagaaaaaaaaattacttagcagaaaacataggggaaaattttgttaaatttggcagtgatttattggatacgacatttaaggcacagacaaccaataaaagataaactggactacatcgaaattaaaaacttttgcgcaccaaaggacaatctcaagatgaaaagaaaacctacagaaagggagaacacatctgcatatcacatatcaaataagggcttaatacccacagtgtataaagaattcctacaactctcttccaagcacttgggagctgaaaaaagaaagaaattttctaaatattaaaaactaaaaattttaaataagaattcctataactcaacaacaaaacacaaatgactcaattttaatgagcaaaggattttaaaacaaactggttcaaaaaatatataaacaaccaacaaaaacaaaaaccaatgtgcattattattggtcattagggaaatgcaaatcaaaaccacaatgaaaaagcagtacagaaccattaattggctattatgaaaaaaatacgacaaccagtatatgtgacaatgtggaaaatagaaacccttatgcattgctggagagaatgtaaaacattgtagccactttgtaaagcaatatacctgttcctgaaaaaggtttacaccaattattctgtgaaccagcaattacactcctagggatacatatatccaaaagaattgaaagcagggactcacacagacatagacataccacatccacagcagccttattgatagcagtcaaattattactgtggaaacaacccatgtttatcaacataaaaatggataaacaaagtatgctttaaccatacagtggaaatttattcagacacaaaaacaatgagttcctgatacatgctaccacatggataaaccttgaaaacgttctaagtgaaataagccagacatggaaggacacatgcatacttccacatatctctctctctatgaatagtcaaattcacagacagagaaagtagaatggagattttcagtactttgggataggatggaataggtaattacatgtatggaacactaagtagatagagcaagtagcacagtaacacgtataaaatgatcccttcctttgtgtattctagtttgtaccagcactgtaagaggcttccagatgagcagttccagtggttaatgttggtagttcaaagggtaacactgccctctaggcaacatcgtggaggtctatttgagatatatttcactacaagttattctcatgaatacttcaatgaaacagctcttatcaaggcccccagtgaccaaatacttgccaaaatctacagtcaaccctttttccttgtcttattcaaattctcagtgacctgtgacacagctgaccactctccccatattgaaataccttcttctggaggcttccaggagaagaaacccatgttttcctcctactacttcattgggtgttggaaaccattatggagtgaggaagtcaatgatttcaggagcttctccactattgatgaagtatcaggaatatctcaaatgctgcaagggaggttggtggggaaaacaatctatgacatgcttgaagactttattgaggaacacattgacaggacaagagcaccgccatctttataacactccaccatcctaagctttaagtttctatttggccacctggccaaaactgaaaatgtcagccccgcccataacttcaacagagaataacggccctaactgtaacagaacagccaggacttccccaacccctccctaacagaattttgtttcaaagcacacttctccactgggccctttaaaaaagcctcaggctgtaagagaagtttgcacctgaccctgccgctggaagcccttctcaggtttactcccaataaaactgtctcaactgttgagccaccttctcatctctcctttccttaatctttctatcccaacacaaataagagagcataaatactaacaaggaactcgaagatatactgaaattctctgcagataatgatgataatgatgatgcagaagacttagaagaggtaatatcaaagatgtgacacttgaaacatgtgcagcagtttttggggcatctacagcctctgcaaggtgaaaagtattaaagattacaatcctcgcagggcacggtggctcatgcctgtaatctcagcactttgggaggccgaggcaggtggatcacctgaggtcaggagttcgagaccagcctgaccaacatggtgaaaccccatctctactaaaaataaaaattagccaggcatggtggcgagtgcctgtaatcccagctactctggaggctgaggcaggagaatcgcttgaatctgggaggtggaggttgcagtgagtcgagatcgcgccactgcactccagactgggcaataagaacgaaactcagtctcaaatgataaataaataaataaaaataaaaataaaataaagattgccatcctcaagtaagatccttcaatggaacaaaacctctgtgtcacccaagggataacatgccaacaaacactgcaaggatatttaaagaaaaagaaccagcttcctacaacaatgtttctaactaaatatctgcaaatatgaagacagatccttcagtgtgtacacatcttcagccctcatgctgaacagattctgacattagtattatttagtctcttccaaactcagcatctgcaatcagaacctggttcatccaacacagatgatcatcctgacatcctgtcaagattcaagtgagcctgatgtctcactgtttatctacagtgccacccatctagtcacctcagtgaatcatattaggcaccatactgtaatcagcatcatcatgatcatgatcatcatcatcatccttgggttatcaagcaagaaggatcaggattttcataagtgttaacacacgattccaggtcattaaataaaagcaatctatgattgttgaaaaaaaagaaactgtagattacaggctcatgcctgtaatcccagcactttgggagaccaaggcaggcagatcatctgaggtcaggagttcgagaccagcctgaccaatatgatgaaaccccgtctctactaaaaatacaaaaaaaaaaaaaaaaaaaaaaaaattagctgggtgtggtggcatgcatctgtaatcccagctactcaggaggctaagacaggagaattgcttgaacccgggaggcagaggatgcagtgagctgagattgtgccattgccctccagcctgggcaataagagtgaaactctgtcttaaaaaaaaaaaaaagaaaaaaagaaactgtaacattctaggtgacatgtactatgtaggcaggcctgtgatggttgggtctgttctcaacagcacaggattattttcatatcacgattctctaaaaaaaatacaataaaatgactgtttacatagcttttacaacacatgaggtattttagtaacctactttttatttttacttttacaaaagctttgggttggtgaaaaattaagtaatctaggcatgatttatgggatgcaggaggatgtggataggttacatgcaaatgtccttttataaaaggaacacagcatctgtggatttaggtatgcttagggggtctggaaccaatcccctgcatatggttaggggataaccatattcaaaagaaacatcttaaggctttaccatgtgtttgcattcatgaggcttatctcctatgtgatttctttcacgtttctgaaatgaaataaaattaatgaatgcttttccacatttatagagtatctctccagtgagtccttttatgtctatgcaaggaactgagagaactcagtgccttcccacattccttacattcatgcatcttctctccagtgtgagttttttcatgtcctcgaaggaaacgagaacgagtgaaggctttaccacattgttgacattcataagatttctttccagtgtgaattctttcatgtcgcagaaggcaagtgagccaagagaatgctttcctgcattccttacattcatatggcttctctccagtgtgaatcctttcatggacttttaagttaccaaaatgactgaaggctttcttacatgttttacattcataaggtttttcagccatgtgagtccttctatgttgagaaaggtatgtgaaacaactgaatgctttcccacattccttacactcatatggcttctctccagtgtgagttgtttcatgattttgaaaggaatagaaatcaataaaggctttcccacatttacatttatagggtttctctccagtgtgagttgtttcatgtcttcgaagggaactagaaatacggaaggctttaccacattctttacattcatagggtttctcaccagtatgagtcctttcatgtccttgaaatacactgggataaatgaaggctttcccacataccttgcatttgtgaggtccatctccagtgtgcattatcatatgacttcgaaagcttgagtgatgagataacgctttcccacactgcttgcattcatagggtttctctccagtgtgagttctttcatgactttgcagtgaactaggacaatcaaagcctttcccacatatcttacatttatgaggtccatctccagtgtgccttatcatgtgtctttgaaagcttcccagatgatgaaatgctttcccgcattgcttgcattcatagggtttctctccagtgtgagttctttcatgtattcgaagggaactggaaacactgaaggctcttccacatcgtttacatttatagggtttttctccagtgtgagttctttcatgtcttacataggaactgtaatcagggaaggctttggaacagtgcttgcattcatatggtttctccccagtgtgtgttctttcatgtcttagataggaactgtaaatagggaaggctttacaacactgcttacattcatacggtttctctccagtgtgagttctttcatgcatacgaaataaactaggccaaaaaaaggctttcccacacaacttacatatataaggtccacctccacgttgtactattatgtgtcttcgaaggtttcccgaagaactgaaggttttcccacattccttacaatcatagcgtttctttccagtgtgaggtctttcctgtgtttgaaaggagtggtgataattgaaggctgtcccacattgtttatgtgtatgtggcttctctccatattcctgacactcatctggtttgtgtccagcatcaaatgtgatatagcaattaaggaatgaacaacccatgatttctccacacacactgcttttacatggatctactccaggaggtttttcattcacagtactatctggctggcgactttcactaaatctctctatgatatgacatctgtaaaacatgagaagtatattaataaaggtttatttataaatgactttatgtttattagtaggtactggatttacatttttacatcatcatgcaacgtgtaggcttcatgcactgcttgaacgtgaatggactgaatgttgtacaagataactcgaccccagctgttttcttgacaatgataaacacatgaaattcttttttttgagatggagtctcgctctgtcgccaggctggagtgcagtggcatgatctcagctcactgcaacctccgcctcccaggttcaagtgtttctcctgcctcagccgcccgagtaactgggactacacacatgcgccaccacgcccagctaatttttgtatttttagtagaaacggggtttcaccatgttggccaggatggtctcaatctcttgaccttgtgatcgctcgccttggcctcccaaagtgctgggattacaggcgtgagccaccgtgcccagccgaattcttaatattgtttctaagggaactatttttgcaaacactgaatagttatatcacatttaagtatatgtttctggagaaaattgtataggaataaataagtttgtactgggctcgttcattttctttgcctagttgtataatttcctgtcatcctaagaattgctccacagatatatgtctttctcttgtgagtgcaaattaccttaggctcctcctgggatttctgtgctgatcttcaatgtttgtgtcttcccatttcattcctaaaaggtggacacagaaaaaacactgtagattattataaaattctaaaaacactacaagattttatgtacaatggaatcatgcatgattcattcactgaattgtagctgactcttgaacaacataggtttgtacctcgtaagtccacttattttatgttttttaagatggagtctcgctctgttgcccaggctggagtgcaatggtgcaatctcggctcactgcaacctccgcttcctgggttcaagccattctcctgcctcagcctcccaagtagctgggactacaggtgtgcaccaccacacccagctaatttctagatttttagtagagacggggtttcaggtgggttttgaactccagacctcaggtgatctgcctgcctcggcctcccaaagtgctgggattacaggcgtgagccaccacacctggctcacaagtccacttatatatgaattttcttcagtctctgctacccctgggacaccaagaccaatccctcctcttactcagcctactcaatgagaagacaatgaggatgaaaacctttatgatgatccatttcaacttaatgcacagtaaatacagtttatcttctttatgattttcttaacatttattttctctagcttacatttttatgagaatatagtatgcaatatatgtgacagacaacatatgtgttaattgattgtttttgtgaccaataagcctgccagtcaactgaaggttaagttgtagtgaacaaaaagttatatgaatatgtacaactggttggggacccagcaccacttaaccctgtgttgttgaagggtcaactatatcccctttcggtatttcaaatcattcaacagcattgatgaccaagaaaaaaatgtctctaattgactaagtgaagacataatgtcatttttacctatacagtccaggttcctaatggtttcccacatcacatctctgtacagactcttctgtgatggacccagcaaagcccactcttcctgggtgaagttcaccgccacatcctcaaaggctactgaatcctgaaacaccccacatgtacaaaggagtaaggctgagactgatagtaccaaaaatttacacccacttcataaactttgcatactattatttctaagcaatgattcaatgacatggtaaatccacccttattctctgtctacaatcactttctccaacacagcaattctgatgctagaattgaatgttgttgtacacataatagtcaaataggaacaagtctctttttgatgacttaaatgagtgaattttattgccggcatcatccctaatgtctactttatagtgggtctgtatttcctgtcgtgacaaagtcctactacttactgtacaagaataggagtcctgagattgtatatatttacaaatgctggttaacaaaattggatccttcgtgtactctaggcactggatttatagagggtctccaccaacataactaataacaggtgctgagtgtgcataaactgtttatggagaaagtatagtatttgcttaactcttaccttctcttcgggagcttggaattttgttacatgctcagcagtgggagcatagctgatcagccaatgctaggtttgaatgtttgtccccaccaaaatgcatgctgaaacttaatccccaatgtgacagtaatgaaagatggcgcttgaagaggttattgggtcttgaggatttggatctcaagaaaatcaagattaatccattcttggattaatggcttaaagaataaatgggtagtgacagagttggacttatgtccctatgagaagagaaagagacctgggctagacactcagctccctcatcacatgacgccctgtgccacacagggactcgacagagtctccaccagcaaggaggttctcaccagatatccagccttgactttggacttcccagcctccagaaccacaaaatatatacactgtttcatttaaatcatctagcttcaggtattctgttataagcaacaaaaaacacactaaggtagacacaaagaaacactctgggcactgagtctctaatgaatgacatccataaataacttttcaaaatgtttattgcaacatgttacttggggattcagcccatcctatgtgattacactaagagagaacatttagaagccagcaacaggtttcctctagatcaaatgtagcaaagcaagacaaaagactaataaaagatgcttcaccatcccaatgcaagaattttaaactttttattaggtaatgtcaaaggagaataatggggacagattgcacatgttcttagaaagaactcaatgttacctctcatgaatatcgataatattccctaaatagctaaatcagaactttagtagtcaacaaaaaaagatatccccaaaactaacagaagtcacaaatgtataaaaatgctaaaaactttctcaccaacaaagttacggctttacaagaacagataaagaattttttttttttttggaggggggagacagagccttgctctgttgcctaggctggagtgccctggcacgatcttggctcactgcagtctctgtctcccaggctcaagcaattctcctgcctcagcctcctgagtagctgggattacaggcgtgtgccagcacactcagctaaaacatttatgatgattcatttcaacttaacgcacagtaaatatagtttatcttcattattttcttattaacattattttctctagcttactttactgtgagaatatagtacgcaatacgtatgacagacaatatatgtgttaatcaattgtttttgtgaccaataagcctgccagtcaactgaaggttagctgtggtgaacaaaaagttatatgaatatgtacagacctcaagattaaatgagaaaaaaaatacgtattaaagacaaaactaggccaggagcggtggctcacgcctgtaatcctagcactttggaaggttgaggcaggcagatcacgaggtcaggagatcgagaccatcctggctaacacagtgaaaccctgtctctaataaaaatacaaaaaactagccgggcgtggtggcgggcacctgtagtcccagctactcgggaggctgaggcaggagaatggcgtgaacccaagaggcggagcttgcagtgagccgagatcgcgccactgcactccagcctgggtgacagagcgagactccatctcaaaaaaaaaaaaaaaagaaagacaaaactagtattttaaacagtaacaaggtctttttcagatttaatgagaatttttttttttttttgagacggagtttcgctcttattacccaggctggagtgcaatggcacgatctcagctcaccacaacctccgcctcctgggctcaagcaatgctcctgcctcagcctcccaagtagctgagattacaggcgcacaccacacgcccggctaatttttgtatttttagtagagatggggtttcaccatgttggtcaggctggtcttgaactcctgacctcgtgatctgcccgcctcagcctcccaaagtgctgggattacaggcatgagccaccgtgcctggccgaggattttcttaagtaagaaaataaaggccgggcacggtggctcacacctatattcccagcactttgagaggccaaggcaagtggatctcttgagcccagcagttcaagaccagcctgggcaacatggtgaaacctgatcactagaaaaaatacaaaaatttgtccaggagtgggggtacatgcctgtagtcccagctacctgggaggctgatgcctgtagtcccagctacctaggaggctgaggtgggaggatcacctgaacccagggaagcagaggctgcagagagcctggatgacatcactgtactctagcctgggcaacagaatgagaccctgtctcccctcaacctcccaaaacaaagaaaagaaagtagatttcaaatgaggagtcttccaaattcaactatattaaaattaggcatagtggctcacacctttaattccagcattttgagaggctgaggtgggaggatcccttaagcccaggagtttggggctgcagtgagctgtgatggcgccactgaactctagcctggggtcacggagcaagattctatctcaaaaaaaagtccatcaaactgtagaatgaaataaaaagataaaccaccatctggaaagaaatactagcaatccttccatgtgaaaactggttagtatgtacagtatgcttaaaaacaaaaagaaaggccaggcgcggtggctcacccctgtaattctagcactttgggaggctgaggagggcagatcacctgaggttgggagttcaaaaacagcctgagcaacatggcgaaaacctgtctctactaaaaatacaaaattagccgggcatggtggcgggtgcctgtaatcccagctattcaggaggctgaggcaggacaatcgcttgaacccaggaggcagaggttgcagtgagctgagatcgctccattgcactccagcctgggcaacaagagtgaaactccgtctcaaaaaaaaaagagagagagagaaacaaggcaaggcaataatatccaaataaattaaacatgaaaaaagacagaaaattacttcacagaagatgaaagaccacaaagaaaaaaatgctcaacaccaatgctaatcagcaaaaaccaatggagatatataaaacataaatctttacaaggcataaacacacacacatacatggtctgagagctgatctacacctgctattaggatttcctcataaatttaaactatccataatctacaatacaacaattttttcccaatgaatagtatcccaatgagttaaaaaagtcatgaagtgttagcacttagggacaaaaaaagaatattttcaacaacatcataaggttaacctgaaagaactcaagtcccatgaacagtgaaatgtgtgaggacttggtgacccacagcctcagacaacagcgtatgtcaaacagattgaagcaaataaacaaatcaaaaaccttttcatcgtattttctcccctctcctttcatctcttcatgtctttggagtcaattaaatatttttcattattccaatttgtttattttctttgcattttagttctattttttttgcattacattttaacaagctgctcctgggaagcagttctcatactttatgtgcattacaagcatctggaggacttaacacagattattggatcctacccccagaatttctttttctttctttttttttttttttttttttggacagagtctcgctctgccgcccaggctggagcgcaatggtgcaatctcggctcactgcaacctccacctcctgggttcaagccattctcctgcctcagcctcccaagtagctgggattacaggtgcccatcaccatgcccagctaattttgtgtatttttagtaaagacggggtttcgccatgttggccaggctggtctcgaactcctgacttcaggtgatctacccaccttggcctcccaaagtgctgtgattacaggtgtgagccaccatgcccggccctacccccagaatttctaattcagtaggactagagtataatcctgaaatgtgcattcctttttaaattttgatgttgtttgtacatattcacggggtacaggtctaatgttgccacaatgatatagtgcattgtggtgaatgaagtcagagccttcggtgcatccatcactgcagcaaagcacatgcatccaccaagcaactgcccatcatccaccatcctccaccctcctagagtctccactgaccatcattccacactctgcttccatgtttacacattatttacacgtgggaggtatatttgcccacctttttttttttttttttgagatggagtttcgctctgtcgcccaggctggagtgcaatggcgcgatctcggctcactgcatcctctgcctcctgggtttaagcaattctctgcctcagcctcccaagtagctgggattacaggcacccaccaccatgcctggctaaatttttttgcatttttagtagagacggggtttcaccatcttggtcaggctggtcttgaactcctgacctcatgatccacctgccttggcctcccaaagtgctgggattacaggcgtgagccaccgtgcctagcctactcacccacttttaagtgagtacatgtggtatttgtctttctgtgtctgaattgttttgcttaagataattgcctcccaatccatccttgctgtcacaaaggacatgatttcattctttttcatggctgaatagtatcccaatgagtatacacaccacgttttatttacccaatcctccacttaggtcgattcccttatctttgctttgtgaatagtgctgcaatatgcagataagtgcaggtatctttttggtgtactgatttcttttcctttggatagatacccagtagcatatctgagacactcagcataatactgagtgcatattaatggtaacattaactaactgaaaacagaaaagaggcaaaactatgctactggataaatacacactgaatctataatgagcaacaaaatacaaactctaggtcagttatgcttctgacctgtagtgtcttacctcacacaacttctgacaacaaatgtatggcatttgctgaacaccaattctccaacaaaaactggtatccaccccacattagtacagaccccacaagttgagggttgaatgtcacaaccaatcagccaccaggcagatgccagtggcaagccccagagaccatccttttaatcaaatgtgtataaaaccaatgactccctctacagggtcaataatgtgccaagccaacccacagaactcagcaagtcactctgcttaaggttgtcagtttgttataaaggatatctcaagaatagccaaaaagagagaggcacagcaaaggaaggggagggattggcaaaccttcccctcttggctgacattacccacccagcaaatccaaatacattttttattatatcaaagacccagataaactctcagattcataaaccctttttccatcaggcagaatcaaaaggtgtctttctctaaatcagctgtgacagactttttaatttgtactgattataccaactgagtgaatgcaaaaccaggctgctgataatgttgaattttacccaaggcctgtaattctagtaaataagtaagatgacagaaaatcacctcaactccccaagcccagttctttgtgttctggacaagcagccgtaaaacaaaacaaaataaaagcaccctttgcttacatagattatgcccctccccccttctctaaactataactcagccagataaagaacctccaaattcccattttttatcttatgattagctgagcagttttgtcttcactgatcatactgaacaaaatacatctaaagaaaactttgcttaagtttttctccttgctccaggaccgtgaactttgactcatcctcagcctgagccagcacaaaacccctccttcataacccatcttaagaacagacttaggttagagcaaaacactctctgaactagaatctgattctcggcccggcgtggttgctcacacctgtaatcccagcactttgggaggctgaggcaggcagatcatgaggtcaggatatcgagaccatcctggctaacatggtgaaacctcatctctacaaaaatacaaaaaattagccgggcgtagtggcatgcgcctgtagtctcagctactcgggaggctgaggcaggagaatcacttaaacccgggaggtggaggttgcagtgagctgagatcacgccactgcattccaacatgggcaacagagctctcgagactctcaagaaaaaaaaaaatctgattctcaccctccatcctgccctccccttcgcatcttccttctaatcttggttgctcttcccttagcaagaaaagaacttttctgcccaaccttagagatgcctcagatctttattttattttattttttttgagactgagtttcactcttgtgagccaccgcgcccagctgggatgcctcagatcttatacttgatgctttcccgttttgcagtactcctttagaatgaagtcacttcttagctaaatgcagatttattttaattgagaatgtctagcaacagccccacaacagtaacaaatacaacctcaaacagggaatcaccccaactgccccagctttctaatgctctgtagcttctttaagtataaaaggcttctcccatggctggagtgatccggaggctcccaggaagaaccaatttaagtgggccttcaataacctccctttgcaggctccagactggcctcaactgggagtcaccggcctcaggcctctccaccccactcacttcctcccatgccttacatggaaagttacttggtttagttagcatttatttatttattagttagtttagttagtatatatttatttatagatgaagtctcactctgtcacccagactggagtgcagtggcgcgatctcagctcactgcaacctacactttccaggttcaagtgattctcctgcctcagcctcccaagtagctgcgacttcaggtgtgggccaccacgcccgtggtggtggtgggcgcctgtaatctcagctaatcaggaggctgaggcacgagaatcacataaacctgagaggtgatgctcgcagtaagccaagattgtgccattgcactccagtctaggcaacagagcaagattccatctcaaaaaaataaaaaaataaaaaataaaggtaggctgggagcggtggctcaagcctgtaatcccagcactttgggaggctgaggtaggaggatcatttgaggttgggagttcaagaccagcctgatcaacatggagaaaccccatctctactaaaaatacaaaattagccgggcatggtggtgcatgcctataatcccagctactcgggaggctgaggcaggagaatcgtttgaaactgggaggcagaggttgcagtgagccgagattgtgccattgcactccagcctgggcaacaagagtgaaactccgtctcaaaaaaataaaaaataaataaaactaaataggaaaagcacaagtatctacccatttcaggcaacaaataccatttaattactacttccataataataaagcatttagtaaattaataatatttgagttctttagctgttggaaagtcctgtgccacagcatttagcattaatctgtcaagtacacataataggaatagaacagttatccactgtcctaaattccccaccctaaaaaggaaagaaactaaagttttggtaaatctttataattcaatcaaataagtaccacattttctgttaatatgtgttcactttttctgcagccataaagaaagtacgaccaaacatttttccttagtcatactgtcactgttaagccctgaaattccatttgaataatcagagaaacttacttgacagactgggggaaaaaaaaagtaaatgaagggtttttttgtttctacaaaaattggacctccccctccccctctgcctccccctccccctctcgctgtccccacggtctccctctccctctccctctccctctccctccacggtctccctctgatgccgagcggaggctggactgtagtgccgccatctcggctcactgcaacctccctgctggattctcctgcttcagcctgcggagagcctgggattgcaggagcacgccaccacgcctgactggttttcatatttttttggtggagacggggtttcaccgtgttggccgggctggtctccagctcctaaccgcgagtgatctgccagcctcggcctcccgaggtgcagggattgcagacggagtctcgttcactcagtgctcaatgttgcccaggctggagtgcaatggcgtgatctcggctcgctacaacctccacctcccagccgcctgccttggcctcccaaagtgccgagattgcagcctctgcctggctgccaccccatctgggaagcgaggagcatctctgcctggctgcccatcatctgggatgtgaggagcccctctgcctggccgcccagtctgggaagtgaggagcacctcttcctggccgtcatcccgtctaggaagtgaggagcatctctgcccagctgcccatcgtctgagatgtggggagcgcctctgccccgccgccccatctgggatgtgaggagcgcctctgcccagcggcgaccccgtctgggaactgaggagtgtctctgcccgaccgccaccccgtctgggaggtaaggagcgtctctgcccggccgccccgtctgtgaagtgaggagcccctccgcccagcagccgccccgtctgggaagtgaggaatgtctccgcccggcagccgccccctccaggaggtgggggacagctcccgcccggccagccaccccgtccgggagggaggtggggggcagcccccgcctggcagccgccccctccgggaggtggggggcgcctctgcccggccgccccgtctgggaggtggggggcccctctgcccggccgccaccccgtctgggaggtgtacccagcagctcattgagagtgggccatgatgacgatggcggttttgtcgagtggaagtgggggaagtgtggggaaaggaaagagaaatcagattgttgttgtgtctgtgtagaaagaagtagacacgggagactccattttgttctgtactaagaaaaattcttctgccttgggaaaaaaaaaaaaaattggaggctgaggaggcagatcacttgaggtcaggagttcaagaccagcctggccaacatagtgaaaccccgtctctactaaaaatacaaaaaacaaaacaaaaaaaaaattagccaggtgtggtggtgcaggcctgtaatcccagctactcgggaggctgagatgggaggatcgtttgaacccagaaggcagaggttgcagtaagctgagatcgcacaactgcattccagcctgggcaacagtgcgaagctccgtctcaaaaaaaaaaaaaaaaaaaaaaggaatagatggctacatatgtgacctgttttctgaaatctaactatttctggcctctatggaaatactttctctatcaatctctaatcttatagttaataaaacgttgaagctgaaaagagtgagtatctcttttcaatgtgacaacctcagggatgggcagcactgactcgaacacaaacaagtctaactcaggtgtcaggtcatcccatctcctgggacattagtcacccccatctgctcagtaaagtgctcagtgaccacccaccaccaccccaggagatacttcactgtgtgcttttcaggctcatgcacacctgacctgaatgggaggttcttgcacaactggaatgagtgggttctccagtgcttacatattgttttctctcttcattagtctgagagtcaggaaggaagagatcacttctgtcttctcccccaaatacaatcattcaactggctgaccagccgtgtgtccccaaggaatggaaactggggttggggaagaacaaggtgattgtcccaagggttagctttttatagaaatggtataccagaatattcctcccatcccacccagggcatccagctgttctctgtgaggccccaccccaacacctcaggctgctcactgggagaaatgacccagggactgatattcactggaccctcccagagacagggcagctgtgtgtatcttgggtcaaccccaggcagttctgaaacagaaccaggaaaaggcagagagtgggctgagaacacatcaccccataaagtttctaaaggggactttcaatgttgattaggtatccgtacccaggggaaagaaaaggagagacacaaaggtttttttgtttgtttttttgttttttacagtgcagtgtcaggttattctctgcttcctcacatgtgaaatgttcaggaacacaaatcttttaagaagccggccgggcgcggtggtcacgcctgtaatcccagcactttgggaggccgaggcgggcggatcacctgaggtcatgagttcgagatgagcttggccaacatggtgaaaccccgtcgctactaaaaatacaaaaaattagccgggtgtggtggtgggtgcctgtaattccagctactcgggagggtgagacaggagaatttcttgaacccgggaggcggaggttgcggtgagccgacatcgcaccattgcactccagcctgggcaacaagagcacaactccatctcaaaaaaaaaaaaaagaaagaaagaaaaaaagaagccatccattgctctctgaaaacaaaatgaaaattaaaatactgggactctgaaatttagcacgggtggggcggaggagggaggagttcatgatgttgctgtgaactgaggagggaaagttagcctgcgtaaggctctggaaaccaagggagttactaccacccctaggaggagttagaatgagggaacagggtagtggatttgagaccctgctacccccatctctgaaaaactcgaagaggaatcagtcaccctgggaagaaaagaagggactggggaccccgcagaccacagctcctcccgtgcacaaaccccacgcaagaatctggattctgattgcagttagatattaaccaggtaccctgagccccactgcctcgcgggggccgccttcctgagagtcaggtcacagaagacactgaccgccggcttctgcattgtgcctggggataagatctcggagagctgctcgagttgcccaagttctttctcagatcttgaattccaacggaaaggctggcgccaagcagggtgaaaaccccacgagggaacccactcagcaggagaatgcggtttcttcacctcccgtcccaggattcgcctgtcacttccccaccaaccagcgaccccacacttcagccgcccctgtccagacccctaaacacccccatccccaaacctctcatggaggcggaactggggtcttctctcctctccccctattaaactgtttctgctgcaggccttggagtctcggtgcagtgactcggaccgcgaacctgtgccggttacagccgcacaatctgggaagacgcggagctgtgggcatggagctgccccagagagggcgcgggagccggggccgcagttgctgcgcagaaacgggacaggacgcccggggtcccggctgccggcccagcccccagctcccaccccgcggccgaggggactgaaggccggctgggccaggggaactcgggtccacagaccccgcagtcgccgcggggacgcccgggtcccgccacagccggttctggccggttccaaccagtccttcgccctgccccaggacgccgggccccgcacactcaccatttcccggcttccgcggtgtcccgtgttctccccaaggttccccgctgccagcataggactcagcgtgacagtgcctgccactgacctgccagggcttctctcagctacagagccaggagcgggagctcagaggggtgtagaaagctccaccctcctcccggcagcgcgcctgactggcagttcccaagaactcgcccccaacactgattgggtagagctccaaattccgcccccccagggaactgattgacagaagaaggatcttacacggctgagtggagcgagatgaagcggttccagacacagcccttgatagggtgggcttcctcccttcgctgtgacctgacccctcccaggggacatttgcatttaagcggaatttcctgcctgtactcaatgggctcttcctgctccttcttcctggacggggacccacaagtgtgtgctgggaattcgagactcactgcccagtggagccatcccctggcctcagagcggtaggggaggcccaggccacacaaaccacactgaagcaggagggaaggcctggtgtcctccagggatcaggaatttaggatgagactgctggctccatggtcaagcctttctcccaccttatctcccaatctactcattctcagaccagaaaataaaaacacatcaacaatgaaataaaattgttaaatgcatggaaaatctggaattatatggcagtaatcttctataaaggaatcaaaagaagggaaaagaaaaaacctgaattagttcagagaaatttcagccacagttcagcaggaaaccccctttcaggaggttaaacatattttcaagcttagaaggcagattctgactcctgaagttgagtcccagagtgtgtaaccagcagcttagcagctgagtctcaaaccacgttttaaaccttttttttcttcttctttcccttttcctctttcccctcctgatctcaagataataacttcgagataaactgcatagatgttacctctcatcttaaaatacagcctcagaatgtgctgtgaacttccactccctttcctttcccatactacactgccatgccttatgcacatttatttttattttatttttttggagacggagtctcactctgtcacccaggacagactgtagtggctcaatcttggctcactgcaacctccgcctcccaagttgaagcaattctcctgcctcagcctcccgagtagcacactggactacaggtgcacgctgccatgcccagctaatttttttgtattttagtagagacagggtttcaccatgttgcccaggctggtcgtgaactcctgagctcaggcaatccgccggcctcggcctcccaaagtgttaggattacaggcgtgagccaccacgcctggcctgtgcacatttatttacctaaatacttattaagcacacaccatgctctcttatttggtcatatatttccttagaagcttcaggggttggatcttgttaggtaccaggcacctctggaattctctttccaacaaaagattacttcaaagacagaacccacacccagctgaagagtgactactatcggggaaaccagcccccaatatttcaacgtaggttctattttccctaagtgtcggcccatctgagaaattaagagaaagagtacaaagagaagaattttacagctgggcctccaggggtgacatcacatatcggcaggttccatgatgcccacctgggctgcaaaaccagcaagtttttattagggattctaataggggagggggtgtacgaacagggagtaagtcacaaagatcacatgcctcaaagggcaataaaagatcacaaggcaaaggcaaaattagaattactgatgagggtctgtgtcctgctgtgcatgcactgtcttgataaacatcttaacaggaaacagggttcgagagcagacaaccagtctgactagaatttaccaggctggaacttcccaatcctagtaagcctgagggcactgcaggagaccagggcgtatttcagtccttatctcaactgcattaagacagatactcgcagagcagccatctatagacctacccccaggaatgcattccttccccagggtctcaattattattattatatatatttttttgagacagagtctcacgctctgtcccccaggctggagtgcagtggcacaatctcggctcactgcaacttctgcctcctgggttcacactgttctcctgcctaagcctcccaagtagctgggactacaggcgcgtgccaccatgcccggctaattttttgtatttttagtagagaaggggtttcaccgtgttagccaggatggtctcgatctcctgatattgtgatccacccgcctcggcctctcaaagtgctgggattacaggcatgagccaccacacctggaagggtctcaattattaatattccttgctgggaaaagaattcagtgatatttctcctactcacatgtccgtctataggctctctgcaagaagaaaaatatggctttattctgcccaaccccacaggcagtcagaccttatggttatctttccttgttcccagaaaatcgctgttattctattctttttcagggtgcactgatttcatatcattcaaatacaaatgttttacaaacaatttgtacagttaatgcaatcatcacggggtcctgaggtgacatacatccttagcttacgaagataacaggattaagagattaaagtaagacaggcataagaaattataaaagtattaattttgggaactaataaatgtccatgaaatcttcacaatttatgttcagagactgcagtaaagacaggcgtaagaaattataaaagtattaattttggaaactgataaatgtccatgaaatcgtcacaatttatgttcttctgccgtggcttcagccggtccctccattcggggtcccttagttcccgcaacagactacaagattgactgcaactaatgtataacctggcaggatccacgacggagaagtcccttcaccaaatgggacaataattcaagaggggcaaccagagcaagtcacgccacctggtacctctagccccgcttgcctcttctgcattccaaaccctttctttaaaaacccctgggttctctccacaaattgaacagtggaattgctttctgctcttcccctgctaggacagataataaagaaatctcgttccctcttatcacaactcattattattttgacttctttccacacgcggtgagcagccagacccttttgccagttacaagtgggatcagcacctggtgatggggcagaggcactgaaggatttagggatgagggagctcaacttgccctcctgtgtcctctgcgcagtgtgaaaatgctctctccttcaagactttaaatattaatgaattaaatgctccaatcaaaagccaaggcattagaatttgaaaatataaagatttcccatatttgtatgaaatacaagtgtcactggtaaactgagttctttctctagtttgtatgagtcacaaagaaagaatacctaatggaacaaaaaaaaaaggcaagcaggatttattttctggccagagaaggagaaggggtcagagtcagctcttgctccgaagatacttcctcctcctagagctgtgggaagctgggtaattttaagcagctagatatgggaaggggaagtttgtaatatgggtagaaaggaacttcagatgttcacaaatcataaacatgtctctttataccacacatgttcaaaaggccagccgggtgcagtggctcacgcctgtaatcccagcactttgggaggccgaggcgggtggatcacctgaggtcgggagtttgaaaccagcctgaccgacatggagaaaccccatctctactaaaaatacgaaattagccaggcatggtggtgcacgcctataatcccagctacttgggaggctgaggcaagagaatcgcttgaacccaggaggcaggggttgcagtgagcactccagcctgggcaacaagagcgaaactccatctcaaaacaaaacaatgggccgggcgcagtggcttacacctgtaatcctagcactttgggaggctgaggcaggcggatcacgaggtcaggagatcgagaccatcctgggtaacatagtgaaaccccgtctctactaaaacaataaaataaaataaaaattagctgggcgtggtggtgcatgcctgtaatcccagctactcaggaggctgaggcaggagaatcacttgaacccaggaggcagaagttgcagtgagctgagatcgtgtcactgcactccagcctggcgacaaagctagactccatctaaaaaaaaaaaaacacgacgagaaagctgccgtgactttcttctgtgggtggggattttcatcttacaataaggtatcagtgatctaaaccagcagttcctaacctttttggcacagggactagtttcttagaagataatttttccatgtactggagtggggatggttttggggtgattcaagtacattacattgattgtgcacttaaatattattacattgtaatatataatgatgtaattgtacagctcgccatactatagaatcagtgggagccctgagcttgttttcctgcaactagatggtcccttctgggggtggtgggagacagtgacagatcttccagaatctcataaggtgcatgcaacctggatcccttgtgtgcgcagctcacaatagggttcgtgctcctatgagaatctaatgctgcctctgatatgacagaaggcagagctcaggtagtaatgtgagtgatgggaagtggctgtaaatacaggtaaagctttgcttactcgcccgctgctcaccttctgctgtgtggcctagctcctaacaggccacagtctggtaccgatccatggcccagggattggggatccctgatctaaaggcaacaaggggtcactggttctggtttactctggttttgagcaggccttatcttattctgataattggcaaagggtcctgaagctcccaggccatctggagtcctagtaagctagcatacctaaagataaacagactaggaaaaaaaaatgttatccactttttcagaaaataattagcggctgggcatggtggctcacgcctgtaatcccagcaccttggcaggccgaggcaggtgaatcacgaggtcaggagttcaagatcagcctggccaacacggtgagaccccgtctctactaaaaatacaaaaattatctgggtgtggtggtgggcgcctgtaatcccagctactcgggaggctgaggcaggagagtcgcttcaacccggaaggcggaggttgcagtgagccaagaccgcaccattgcactccagcctgggcaacagagtgagaccccatctcaaaaaaaaaaaaaaagaaagaaaagaaagaaaagaaaaagaaaataattagccatttcagctgttttgctttctcagctatttttccaggactggcccagtaacaaaagtaccagatataaaagcatcatgaattggaagctggaacccatggctaaaaagaaagaagccaaacatcaagtgtaattcaatgaaacaaaatcctgaatcaacttgtgataattgtagtgtttcctgacaagacaaattggcaagtttgaaaaacaagaaaaaaaagatgtctgattataactaatgaatgatattcatgcctttaaaaattacacacacatgcacacacacactcacaatctattatcacaagactgttctctctctgaagaatcaaccatctttctgtaagatgcttcatcaacctttcacattaactgcctttggagtaatattatatacttactttttcctagacagttgtgaaaacagggtgcagtgggtcaaaggtggtgtcaggggtttatgttcagattttgcatatttttacaaattgcagcaattaactagttcattactgtgttgatttaaattcttacaaaagcttccagacaaaaataaacactcatataaccatgaggaaaaaattcagaatagaatggagtccagaaataaggccacacacctatgaccacctgatcttggacaaagctgacaaaatcaagcaatggggaaaagacttcctattcaataaatggttatggtttaactggctagccataggcagaagactgaagctggaccccttccttacaccatatacaaaaatcaactcaggatggataaagacttaaatgtaaaacctcaaactataaacaccctggaagaaaacctaggcaataccatcctgtacacaggaacaggcaaacatttcatggcaaagacaacaaaagcaattgcaacaaaagaaaacattgacaagtgggatctaattaaatttaagagcttctgtacagcaaaaggaactatcaacagagtaaacagacaacctacaaaataggaaaaacatcttcaaactatacatctgacaaaggtctaatatctaccacctataagaaacaaagaaatttacaagagaaaaacaaacaccaccattaaaaaatagtcaaaggacatgaatagacatttttccaaagaagacatacatgcagaggccgggggtggaggctcacacctgtaatcccagcactttgggaggccaaggtgggcggattacctgaggtcaggagtttgagaccagcctggccaacatggtgaaaccccatctctactaaaaatacaaaaaaattatccagacatggtggcgggcgcctgtaatcccagctacttgggaggctgaggcaggagaatcgcttgaacctaggaggtggaggttgcagtgagcccagatagcaccactgcactccagcctaggtgacaagagcaagactccatctccaaaaaaaaaaagagaaaaaagaaatacacttcaatcaatgcaatcatctagaggaatataaaagacaaatttttattaactgatttcatcaaaaaacactacctattcaactcatgaatttatgtgtcaagagaacttatttacagaattctctcaccttgatgtgtttttttctgaaagtaagatgtaggaatccatagtccagatccactttaagcaggaggcactgataaagacaatagagttacaccttttatgacaattctttgatgttccaaattttctggcacattttgcacgagtgaatttggatgtgagttttctttttttggagatggagtctcactctgtcgcccaggatagagtgcagtggcacgatctcaactcactgctacctctgcctctggggttcaagcaattcttctgcctcagcctcctgagtagatgggactataggcacatgccaccatgcccagctaatttttgtatttttagtagagacagggtttcaccatgttggccaggatggtcttgatctcctgacatcgtgatctgcccgccttggcctcccaaagtgctgggattacaggtgtcagccaccgcacccagccggatctgagttttctaaattacatttatagcatatctagccagtgtgagttatgataaggaatcgtcaatctaccaaagttgtattaatatgtatatccatggaggtgacacttacgtcaattgacacttacatcatttcatcaggaaacatagacagatgctgcacatgaaattagccctaggctggacgcagtgagtggctcacgcctgtaatcccagtactttgggaggccacagtgggtggattgcttgagttaaggagttggagaccagcctgggcaacatggcaaaaccccgcctttaccaaaaacaaaaaaaaattagccaggcatggtggcgcacacctatagtcccagctacttgggaggctgaggtgggaggatcgcttgagcccgggaggcagaggttgcagtgagctgtgatcccccaattacactccagcctgggtgacaaagtaagactctgtctttaaaaataaaagaaagaaaggcttttacctgagcgcaagatgggtcaccagctgtactggagacaccggttctcactcttgtcgcatctgttcaaaccagcatggtctgatccggaaatatggtctcaatatgtgccgccagtgtttctgtaagtatgcgaaggatgtaggtttcattaagttggactaaatgaccttccttcaaagggttatccaaagcacctacccaatgaaaaaccaggatagttctttgtatataaaataaacattttttaaaaaccttcaaaaaaaaaaaaagaaattagccctattcctcagaaatttatatatttttgcaagaaatgtgattttaattcaatagcatacagtacatgttattgtaaatgcagtatacatttactccataagtaggaaattcactccttcccaagttttaatggttttctaatacttttaaatgttttgtctttagtttcccaaccaaatatggctatcatctctaaacacaataattttttttccatcctagtttttatattgtttattgatttttgacaataagttttatagactactgtaatagtgagaggaatgaaatagaactattttatttatttatttttttttttgagacatggtctcactctgttgcccaggttggagtaaagtgttgcaatcatgactctatagccttgacctcctgggctcaagtaatcctcccgcctcagctacctgggtagttgggattacaggttaaaaacaccatgcctagttaattttaaaattttttctagagatggggtgtcactatgttgcccaggctggtcttgaattcctgggctcaagtcatcatcctgctttggccttccaaggtgctgggattacaggcatgagccactgtgcctggctatgtttccttttgttagcttatgatcctccttttcagtgggaagcctgtcacacaacagtttctcatcatgctgtgctctgaaacataccttaaccaagaatcctacatcaaggaaagctcatgtttaaaatgaaagacaaaacaaagtctttttcaagaataaaaacatacatattgagacgatttgttcctaccacaccagacctacaagaaagatgaaagaaagtccttatgtctgaaaccaaaggatggcaaaatccgcaagaaaagagagagagcaccattaaagatcattatatgaatataatatccagactaaatgtatatttcctcacctttcttctcctcatggatttacaaagcaactgtgtaaaataataactagttggtgaattcttgggcctagaacacataaaaatgtaatgtatgttttatattcacaaataacactgtaaaaacctgagttaactaaatgactaccaaggggaaagcaataattataagaaagtactgttggatgtgcaaccctaagagttgttacacatgaaacgaaacaccccagaaaggcaaacatataatagagctatacaggataaatatgtttttgtttttgtttttttttgagatggagttttgctcttctttcccaggctggagtgcaatgatgcgatctcagctcaccgcaacctctgcctcctgggttcaagcaattctcctgcctcagcctcccaagtagctgggattacaggcatgcgccatcaagcccagctaatttttgtatttttagtagagacggggtattaccatgttggtcaggctggtcccgaactcctgacctctgatgatccacccgcctcggcctccaaaagtgctgggattacaggcgtgagccaccgcgtctggtggataaatatgttttttacatcactggaatttatccataaatcactggaaaactgcccaattgtgatattatcatttacatgataaacattcgattaatcactacaaaatctcacaacaagtataacaaaaaatagatcatcccctacatcgcgaagacatattatgtgaaatcagaatttactgtccttccttagttaaacattgactctacatccattccataagatcatggccccaagatttcctgcattcatccaacttggaaatttccatgttatatcacttatttctttttctttttttttttttgagacgaagtcttgctcttgtcgcccaggctggagtgcaatggtgtgatctcagctcactgcaacctctgcctcccaggttaaagcaattctcctgcctcagcctctcgagtagctgggattacagacacctgccacgacgcccggctaatttttgaatttttagtagggatggggtttcaccatgttggtcaggctggtctcaaactcctgacctcaggcgatccgcccacctcagcctcccaaagtgctgggattacaggcatgagccaccgtgcctggcccaaactttttattagcatagatttgcagttaagttttgaaatccagaagttagagcctactaacctagttcttgtttttcaagactgttttgtctattcagaggcccttgagatgccaaatgtaaaaaatgaaaaaatggggaaaaatggttcctagaaataaatcaagaggtcaaaactataactaaaaggacagcagagagtaaaaagtgctattattcaatgagaagtaagaatcttagattcttagaaaaggggcatttaactttggaaagtaggctcagtaagaacaaactaagcattcgcacacaaaaacagaaaaacagaaagaaaatgaagttcctggaagtgttagagctgctcctataatggtgaaaatgatccttctggatcatgataaactgaatataaggaatgagaaagcattaagagtgtggctagaggacatgtcacagaaccacatctctattgatagtaaaatgatacatgaaaaaaattagcctctgtaagcaccacagtgagacagttgagaagagcgagaggaaggagtttcaggcccatgaaatctagctgggtcagctaggtaaagcactacagacacgagaacttaaggaccacaggagaattgccactgggtggtgacaaggtgggaggatctcttgagcccaggagttcaacaccagcctgggtaacagcaagactccatctctacaaaaaaatttaaaattagctgggtgtggtgatatgcacctgtagtcctagctactcaggagattgaggtaggaggactgcttgacctgaagagttgaggctgcagtgagctatgatcatgccactacactccagcctgggcaacagagcgagatcatgtctctttaaaaaaaaaaaacccaaggcgcggtgccccgtggctcatgctggtaattccagcactttgggaggccgaggcgggcagatcacgaggtcaggagatcgagaccatcctgcctaacatggtgaaaccccgtctctactaaaaatacaaaaaaaaattagccgggcatggtggcgggcgcctgtagtcccagctactcaggaggctgaggcaggagaatggcgtgaacctgggaggcggaggttgcagtgagccgagatcgcgccactgcaatgcagcctgggtgacagagcgacactccgtctcaaaaaaaaaaaaaaaaaaatcccaaaagagttaatgaaactcataaaaaacagactaccttccagagcaagtcctccatcataatgaattgggcatgttctgaaagatgatgcccaatagtcccttcatccaaaagagtgtgaaccagggcgcggtggctcacgcctgtaatctcagcactttgggaggccaagtcgggtagatacctgaggtcaggagttcaagaccagcctggccaacatggtgaaaccccatctctacaaaaatacaaaaattagccagacgtggtggcaggcgcctgtaatcccagctactcgggaggctgaggcggaagttgcagtgagccgagattgtgccattgcactccagcttgggtgacagagcaagactccatctcaaaaaacaaacaaacaaacagtgtcaagcaatccctggggttcaagaccaggaaagatcaccttactctggtgctatgtggcaatgcatcgggtcacaagaataagccagccttatctactgagcaaacaatcactagattctctaaaacaaaagcaaaactttgttgcctgtgtgccagcaagaacacaagaagacttgaatctaccaatgcttcattcctgaagtgaaaaactaccttgaagaaaagggaatgccactcaagagcctcctcataattgacaatgctcctggccatctctttatgctgataaaaaatgtggaggtgatgttcctgcctcctaaaactacatcactgctacaaccacttaatcaaggcatcaggaagattaaggtgactttcacctttctcacctgtaggcggattcatgttgtcttttaatttttttagagatggaatctatgttgctcaggctggtctcaaactcctgggctcaagagattctcttgccttggcctcccaaagcactgggattacaggggtaagccactgctcctggcccaaactcatgttgtcctgatgctacccatgactgtaccatagtggatttatggaaagagcttcacaactgcagatgccattgtgcatatgacagagggtgtagatgtcctaaaggtcaagacagccaaagcatgctggaagccattatggagtgtgggagtcaacgatttcagggtcttctcgggtattgatacggtaggcaggaatatcccaaatgttacaaggcaagttggtggggaagattatctctgactggactgaagacaatgttgaggaaagcatagaagagcatacagaaatccttactaacaaggaactcgaagatatgctgaaatcctctccagataaggacgatgatgatgccgaacacgtagaagaggttgtccagagatgtggacacttgaaaaatttgcagcagtttttggggcatctacagcctctgcaaggtgcaagtattaaagattaccatcctcaagtcagatccttccatggaagaaagcctccatttcacctgagggataacatgccaacaaacactgcaaggattttttgatgatttaaaggaaaagaagaaccggctttctacaacgctgtttctaactaaatatctgcaaatatgaagacagacccttcaatgcttacagatctttggccctcaaattgaacagatcctgacattagtactatttagcctcctccaagtgtcaacatctgcaatcagaacctggttcttccaacacaaatgattgtccagacatcctgtcaagattcaagttagcctgatgtctcactgcttatctattatgccacacatctagtcacctctacacgtaatattagtcaccatacagcaatcagcattatcataatcattatacttgggtaatcaagcaagaaggattagaattttggtattaacatgctcttgaagaaaattaaacaaaagcaatctgccagtgttgaacaacaacaacaaaaaaaactataatgttataggtgacatgtactatgcaggtaggcctgcaatggttgggtctgtccagaacatgtatagacttctatcatgattccctaaataatacaataaaacaactatttacatagtttttacaatgcatgaggtatttaatccagagatgacttagagtgtacagggagatgtgggtagataacatgcaaatatgtaattttataaaagaaacttggcatgtgtggatttaggtatgatcagggactgctggaattaatcccctgcatatgtcaggggaaaactgtatttgaaataaactgaaatcacttaagccttcaccacatggtttacattcatagagtttatttctttttctttttttttattttttttgagatggagtctcactctgttgccaggctggagtgcagtggcgccatctcagctcactgcaatctccgtctcctgtgttcgagccattcccctgcctcagcctccagagtagctgggactacaggtgcgcaccaccatgcctggctaagtttttgtattttagtagagacagggtttcaccatgttggccaggatggtcttgatctcctgacctcgtgatccgcccacctcggcctcccaaagtgttagggattacaggcatgagccaccgtgcccaagccatagagtttatttccaatgtgatttgtttaattttctcaggtaaaataaaattaatgaatgctttcccacattccacacatttatagagtatctttccaatgagtccttttgtgtctgtgcaaggagctgagagaactcaatgcttttccacattccttacattcacatagcttctttgcggtatgagttctttcatgtccttgaaggaaacgggaatgagtgaaggctttaccacattgtttaccttcataaggtttctctcgagtgtgaattctttcatgttgtagaaggcaagtgagccaagagaatgctttcctgcattccttacattcatacggcttctctccagtgtgaatcctttcatgttgctttaagtgaccaaaatgactgaaggcttttctacatgtttgacactcataaggtttttctgctgtatgatttttttatgaagagaaaggtactggaaacaaccaaatgctttcccacattatttacattcatatggcttctctcccatatgagttgtctcatgattttgaagggaataaagatcactaaaggctttcccacatttacatttatagattttctccctagtgtgagtcctttcatgtctttgaaatccaatgaaataaacaaaggctttcccacatatcttgcattttgtgaggtccatctccagtgtgcattgtcatgtgtcttcgaaagcttgagctatgagataacgctttcccacactgcttgcattcatagagtttcttctctccagtgtgagttctttcatgactttgcagtgtactggaacaatcaaagcctttcccacatatcttacatttatgaggtccatctctagtgtgccttatcatgtgtctttggaagcttcccagatgatcaaatgctttcccacattgcttacattcatggggtttctctgcactgtgagtggtttcacgtctttgaagggaagtggaagcactgaaggctttcccacattgtttacatgtacagagtttctctccagtgtgagttttttcatgtcttagacaagaactgtaatcagggaaggctttagaacactgcttacattcatacagtttctccccagtacgtgttctttcatgtcttagataagaactgtaaaaatgaaaggctttagaacactgcttacattcatatagtttctctccagagtgagttctttcatgcatacgaaataaactgggccagaaaaatgctttcccacacaacttacatttataaggtccatctccatgctgcactgccatgtgtctttgaaggtttcccaaagaattgaaggacttcctacattccttacaatcatatggtttgtgtcctgtgtgagaaattttgtgggtttgaaacgagtggcaataactgaaggttttccaaaattgtttacgtgtattacgcttctctccatattcctgatactcatgtggtttgtgcccagcatcaactctgatgtggcaatgaagggatgaaagacccgtgacgacttctccactcattgttttcacgtggacctactccaggaggcatgtgcttgttcacaacagtatctccaatctggctagatgtttctccacaatgactactgtctttactttcaccgaagcgctctaccatatcgcatctgtaaaaaatgggaagtatattactaaaggtttgtttataaatgattttatatgtattaataggtattagatgtactttttttttttttgagatggagtttcactcttgttgccctgactggagtgcaatggtgtgatcttggctcaccgcaacctccacctcccaggttcaagcaattgtcctgcctcagactcccaagtagctgggattacaggtatgtgccaccacgccaggctaattttgtatttttagtaaagacggagtttctccatgttggtcaggctggtctcgaactcctgacctcaggtgatctgcccaactcggcctcccagagtgctgggattacaggtgtgagccactgtgcccagcctagatgtacatttttaacattatcatgcaaagcacaggcttcaggtgacgcctgcttaaatgtgaatgcactgaatgttgtgcaagataacttgaccccaagtgctttctcaatgatgatattcgtatggggattctttttctttttttttttttgagacagagtctcgctctatcgcccaggctggagtgcagtgatgccatctctgctcactgcaacctctgtctcccaggttcaagcgattctcctgcctcagcctcccaagcagctgggactacaggcacacaccaccatgcccagctattttttgtatttttagtagaaacagggtttcaccatgttggccaggctggtctcaatctcttgacctcgtgatctgcccacctcagcctcccaaagtgctgggattacaggtgtgagccaccacgcctggccaaaggtttgtttataaatgattttacatgtattaataggtattagatgtacatttttaacattatcatgcaaagcacaggcttcatgtgaagcctgcttgaacgtgaatggactgaatgctatgcaaggtaactaaatggcaggtgctttcccaataataatattcatatggggattcttaacattgcttccatggaacttattatgcaaacacttgaatagctatgaaaccattaagtatatgcttttggagaaaattttctaagaataaataaatttaagctgggtttgttcattttctttgcttctttgtaaaatttcctatcatttgaagaatgactccagaggcatatctttctcttgtgattgcaaattaccttacatttatcctgtgactttcgtattgatcttccctgatctggtcttctcatttcattcctaaagggtagacccagaaaaaatttttacaaaattatagaaaaactgtaagatattatatatagtgcaatcatgcaggattcattcaccaaactacagtggactcttgtaaacagttttgaattgctcaagtccatttatatgcaaaatttcttcagtttctgctatccctgagatagcaagaccagtctctcttactcagcctactcaatgtgaagacaataaggatgagaacctttatgaacatctacttccacttaatgaatagtaactacagtttctcttccttatgatcttcgtatcaccattttgttttcttttcttttcttttctttttttttttttttgagacagagtctcgctctgtcacccaggctggagtacagtggtgcgatctgggctcactgcaaactccgcctaccaggttaaacgaattattgtgcctcagcctcccaagtagctgagattacaggcacgtgccaccatgcccagcttatttttttgtatttttagtagagatggggtttcgccatgttcgctgggctggtcttgaactcctggcctcaagtgatccgcctgcctcagcctcccaaatgctataggcatgagccaccgtgcctggcccatattgccattttctttctttagcttatgtcattgtgagaaatatataacatatatgacatacagtgtatgtattaatcaactgcttatgtgaccgataagggtgccagtgaacattaggttaaactgtggtggaaaaaagttatatcaggatgtacaattgcttggggggctgacacccctaaaccctgtgttattccatggtcaaccagaccccctttccatattccaaatcttcaacagcattgcacatcaagaagcaaatgtccctaattgactaagtggagatacgacatcatccttacctacacagtccaggttcctgatggtttcctgcatcacatcttcgtagagattcttctggcaaggacccagcaaagcccactcttcctgggtgaagttcacagccacatcctcaaaggcaactgagtcctgaaacatcccacatatgtagatgagggaagcagagactgacagtactgagaatctacacttacctcttaaatttccagggtgcgtggtttccttcttttttttttaggtggagtctcactctgtcgcccaggctggagtggagtggcgctatcttggctcactgcaagctccgcctcccgagttcacgccattctcctgcctcagcctctcgagtagctgggactacagggcctgccaccacgcccagctaattttttgtatttttagtagagacgggatttcaccatgttagccaggatggtctcgatctcctgaccttgtgatccacctgcctcagcctccaaaagtgctgggattacaggtgtgagccactgcacctggctagggtgtgtggtttctaagcgtgacatggtaaatccactttcattttctgtctacactcactgtctcccacatggcaattctgatgctacaattaaatgtttgctaaggcaacaattgaattgggacgggtctcctgttggtaagtgaagtcagtattattacatggaccttcatggctatttctacagtggatctgcagttcttatcaggacaaagtcctactctttattgtgcaaaagagttaacattagcagtcctgagactacatatcctcacaaatgcttgtttacaatgttggaccttttatggtgtctaggcactggatttagggagggtccccaccaatgtggctagtaaaagggactgagtgtacctaaactatttatgcaaaataataaggcatttgcttagttcctatattcctctgagaactggaattctatttcatgctcagcagaggaagtgcacctgatcagccactgctaggtttgaatgtctgtcccctccaaaacacatgttgaaagttaatctccaatgtgaaagtaataaaaggtggggctttaagaggtgattgggtcctgagggtttggacttcataaacagattaatccataatggctgagtgaataaatgggttatctcaggagtaacactgtggtcatgtcatgagaggaagaaaagatctgagctagaggctcaatcccctcactatgtgatactctgtgctacctagggactctgtagagtccccaccagcaggaaggttctcaccagattcccagccttgacctgagacttcacagtctccagaactgtaaaaactaagtatgatttcttatcaattgcccaggttcacttattctgttataagcaaaaaaaacaagagaaagacagtcatgaggaaacactctgagcactgagtctaatgaacacccctggtagattacatttcatattctttgttgcaacttgtgattagggggatctggcccagcctatgtgcgattacagtaagagaatatttggaagctggcaactggtttccactagatcaaatgcagtaaagtaggacaaaagactaataaaatatacttcacaatcccaagggaaaaatcttaaacttattattaggtaatgtcaaaagagaaggaaagaaacggtggattgcacatgttcttagaaataactcaaagtcatctcttatgaatatgtataatattccataaatccctaaagcagacctttagtagtcaacaaaaatgacattaccaaatctaagtcaaaaatgtctaaaaatgcttaaaacttctcattaaatgacagcattataaaaacagataaaggattcttaagttataatattcagcaccccataaaattaacagaaagataaagataaataaaaataaaagtgaaaatggaaggaaagccttgtggagtttctgtttgtcctaggcccaatccctccccacctcagtgccagtctctctctctctctatatatatacacacacacacacacacacatatacacatatacacacacatatatatacacatatatatacacatatatatacacatatacacacacacatatatatatatataattttttttttttttttttggagacagagtctcactctgtcgccgaggcgggagtgcagtggtgcgatctcggctcactgcaagcactgtctcccaggttcacgcaattctcctgcctcagcctccccagtagctgggactacaggcactcgccaccatgcccggctaattttttgtatttttagtagagatggggtttcactgtgttagccaggatggtctcgatctcctgccctcgtgatccacccgcctcggcctcccaaagtgctgggattacaggcatgacccaccatgcccagccattaacctcaattctttttttacatatattttactttgtttcagagacagggtctcgctctgtctccagcccaggctggagtgcagtggcatgacctagctcactgcagcctcgaactcctgggctcaagtaatctggtgatctcagcatccctagtagctatgactacaggcatataccaccaagcctagctaaattttccttttttcttttttttttttttttttttttgcatagatgaggtctcaccatgttgctcagactcgtcttgaaatccaggccttggttgggcatggtggcacacacctgaagtcccagctacttgggaggctgaggcaggaggatctgttgagcctaggagttggagatggcaatgagctataatcacaccactgtactccagcctgggcaacaaattgagacccccatttccaggaaggaagggaaaggagaggagggcaggggaggaagaagagaagagaacggaagggaaaggggaaggggaagggaaaggggaagggaaaggggaaggggaaggggaaggggaaggggaaggggaagaaggaaaatccaagcctcaagcaatcctcccaccttggccattcaaagtgctgccataacaggcatgagcgaccatgcacattccactttcatttttgaggatccactctcataatctaacctaatccttatcatgtctcaaaaaaaccattgcctaatactgccacatcagggaagtggaaaaataaataaaattttataaggacataaacatttattccacaataagtgatttattagtagctttttatcattttctaaatactcatgttaatcccttatcagatatataatttggaaatggtttctcccattctatgggttactcatttactctgttaatattgcattttgatgccaaaggtccacaaactccaaattatttttttcccttgtgggtcatgcttttggtgccaaatctaggaaatcactgccaaattcactgtaatacagcttttgccatgtattttcatctaacagttatacagctaagatggacactcacgtatttcattcattttaacttctgtacatgttaggtatgggtacaacgtcatcctgttgcatgtggatgtgcattgcccaacagcatcattctacagaaacactaagctatcccccatcgaatagtcacagcagacttttcagaaattgttagactttatgtaaattattagactttattagactttctgtgttatcttgttgcattgtctatttctgcgttattacgctagtaccaaacagtttttattagtatggatttgtaataagttttgaaatcaggaagtgtgagttcaccaactttgttctggctttttctttttttttttttttttgagacagagtctcgccctgttgcccaggctggagtgcagtggcatgatctcagctcactgcaacctccacctctcaggctcaagtgattcccctgcctcagcctcctgagtagctgggattacaggtatgcgccaccatgcccgattaatttttgtatttttagtagagatgcaatttcaccatgttggtcaggctagtctccaactgctgacctcgtgatccgcctgcctcagcctcccaaagcggcgggattacagaagtgaggcacatctggccattgttctggcttttgaagactgttttgttcattcagagacccttgagatgtcatatgtaaaaaaataaaaaatgttaaaaaatggctcctaagaaggaatcaagtggtcaaacctatccctaaaaggctagcagtggttaaaaagtggtatctctcaataagaaaatacaaacccaagatgttttgaaaagtggtgtatcaccttgaaaatttcatcataaagtaagaacaaaccaagaaaccacacactaaaactgagagaagctgaagttcttgaaggtgttagagcttttgccaccgtagggtggcaaaaatgatccctctggtttatgataaactaaggataaagactaagaaagcattaagtatgtggctagaggacatgtcacagaaccacatccctgctgatggtaacatcatacttgaaaaaacacttagccgggccaagcgcagtggctcactcctgtaatcccagcactttgggaggccaaggcgggtggatcacgaggtcaggagttcgagatcagcctgaccaacatggtgaaacccagtctctactcaaaagacagctgggtgtggtggcgcgcacatgtaatcccagctactcagaaggctgaggcaggagaatcacttgaacccgggaggtgggggttgcagtgagccaagatcacgccactgtactccagcctgggcgacagagcaacactccgtctcaaaaaaaaaaaaaaaaagaaagaaagaaaacaaacaaacaaaaaaacatttagcctctatgagcatcactgtgagggggctgaggagagcaagaggaaggagtttgaagccagtaagttctggctaggctaactatgcaacacagtgcagcccaagaacttgaagaccacaggagaactggcatcggctgaagccacggaaacaacagcattcctagaagagctcataaaacagaaaaaagaaagactatcttccagagtaaatcttctattgtcatgaatcaggcatgttctagaagatgcccaatggtaccttccgtcatgagtgcaggaactagggttcgaggcctggaaagaccaccttattctggtgctgtcaggccatgcattagttcatgagaacaagcgaggcttcatctactgagcaatcaccaggttctttaggacaaaagcaaaacttgctggcctgtgtcctggcaagaacataagaaggctttcttctagcaatgcttcactcctgatgtgatggaatacctcaaagagaagggactgccactcaaggtcttcctcagaattgacaacactccaggccatctctccaatctctttgttttgcctaaaagaacatgcaagtgatatttctgcctcctaaaactacatcactgctgcgtcactagatcaaggcatcatcaagtgcattcaagtgacttacatccacctgaccttggctgatttcttggagtcttgatgctaaccttgaatgtaccacagtggttttattgaagagcttcacaattacaaatacaattgtgcttattgggaaggctacagatgccctaaagcccaggacagccaatgcatgttacaagccatcatggggtaagggagtcaatgatttcaagggcttccccactattaatgcagttattaagaatatgtaaaatgttgctaaaaaagttgatggagaacgctgtctgaaacgactgaggatgacgttaaggaacacaccgaaaagcaaagagaaacccttaccagctaggaacttcaaagtctgctgaaatccactacagatgatgatgagctagaaaacttagaggacacagagccattgatttggacacttgaaaagtttgccacagtttttcagtaggcaaaggtgaaaaagaggtacgatcctcaaagatcctacaatggaacaaagctttcactccacccgagaaataacaacatgcctataaacactgcaagattttttttttaatgaagcaaaggaaaagaagaactagcttcctataactaagcatctgcaaagaagatggaacattcaatggttacagatcttcagccctcaagccaaacagatcctaacattagtattacatagcctcctcaaatgagtccacatctataatcacaagttggttcttccaacatagatgatagtcctgatggcctgtcaagattcaagttaacctgatgtctcactacttacccacaatgccatacatctagtcatctcaacacatcaaaacactgggcaccacagaatcatcatcgttataatcactatacttgggttatcaagagagaagacccagggttttggtaagtgttaacacattaaacaaaagcaatatgtgagagttgaaacaaagaaactttaatgttctggctgactatactatgttgataggctgacaattactgcatctatactgaaaatacatagactcttttccttatcatgagtccctaaacaatacaatagaacaactatttgcatagcttttacaatgcatgaggtattttaagtaatctagacataattgagagtatacaagaggatgtgggtaagttacatacaaatatgtcattttataaaagggactggacatggctcacggagtgctggaaccaatacccagcaggtatcaagggatgactgtactggaaagaaactgaaattacttaaggttttaccaagtgcttacattcacagggtctatctccaatgtgtttcgtacaagtatctgaaatgaaataaaattaataaatgctttcccacattccatacatttagagagaatgctagtgagtctttttatgtctatgcaaggaactgagagaagcaaatgctttcccacattccttacatccatacgggttctctccagtgtgagtttttttccagtgagtctttttatgtctatgcaaggaactgagagaagcaaatgctttcccacattccttacattcatacgggttctctccagtatgagttttttcatgtccttgaagaaaacgggaatgagtgaaggctttaccacattgttgacactcatagggtttctctctcatgtgaattctttcatgtcgtagaaagcaagtgagccaagagaatgctttcccacattccttacattcatacggcttctctccagagtgaattctttcatgtacttttaagttaccaaaatgactgaaggctttcttacatgtgttacactcataaggtttctctcctgtgtgagtccttctatgttgagaaaggtattggaaacaactgaatgctttcccacattccttacactcatatggcttctctccagcatgagttgttttgtgattttgaaaggaatagaaatcaataaaggctttcccacatttgcatttatagggtttctctccagtatgagttgtttcatgccttcgaagagaactggaaatacggtaggctttgccacattgtttacatttatagggtttctctgcagtgtgagtcttttcatgcctttgaaatacactgggataaacaaaggctttcccacatatcttgcatttgtgaggtccatctccagtgtgcattgtcatgtgtcttcgaaagcttgagctatgagataacgctttcccacactgcttgcattcatagagtttctctccagtgtgagttctttcatgacttttcagtgaactaggacaatcaaagccttttccacatatcttacacttatgaggtccatctctcgtgtgcattaccatgtgtctttgaaagcttcccagatgatgaaacgctttcccacattgctgacatgcatagggtttctcatcagtgtgagttgtttcgtgtcttcgaagggaagtggaagcactgaaggctttcccacattgtttacatgtatagggtttctttccagtgtgagttctttcatgtcttagacaagaactgtaatcagggaaggctttagaacactgtttacattcatacagtttctccccagtatgtgttctttcatgtcttagataggaactgtaaaaagaaaaggctttagaacactgcttacattcatatggtttctctccagtgtgcgttctctcatgcatatgtaataaactgggccaaaaaaacgctttcccacacaacttacatttataaggtccatctccacgctgcactgccatgtgtctttgaaggtttcccaaagaactgaaggacttcccacattctttacaattatatggtttctttccagtgtgaagcctctcatgtgtttgaagtgagttgtggtaactgaaggctttcccacgttgtttatgcgtatctggcttctctccacattcatgatactcatatggtttgtgcccagcaccaactctgatgtaacaattaagggatgaatgacccatgatgacttctccactcatacggctttcatatggacctactccaggaagagtgttcttggtcacaatactatcttgaatctggctagatgtttctccacattgagttccatctttactttcaacaaatctctctaacatacgacatctgtaaaaaatgggaaatatatcactaaaagtcggtctataaataattgtataggtattaataagtattggatgtacatttttaacactatcatgcaaagtgcaggcttcgtgtcctgcttgaacgtgaatggatggaatgctgtgcaaggtaactcgacccaggtgttctcaagacaatcacattcatatgtggattcataatattgttgtcatgggaactaatttatgaacactgaacagctatggaacatttaagtatatattttggagaaaattttctaagaataaataaatttaagctaggcttgttcattttctttgcttgtttttaaattttcatatcattctcagaacggctccagggacatatctttctcttgtgagtataaattaccttagatttttcctgggatatctatattgatcttcaatgttctggtctttccatttcattcctaaaaggtatacacagaaaaatcattacaaatttttacaaaattatagacaaacagtaacattttgatgtacactgcaatcgttcaaaatgcattcactgaagtacacctgactcttgaaaaacagaggtttgaactgcacaagtccatttgtatatacatatatatatgaatgttcttcagtctctgctacccaagacactaagaccagcccctcctcttactcagcctactcaatgtgaagacaatgagaatgaaaacctttctgatgatgcacttccacttaatgaacagtaaatacagtttctcttccttatgattatctttttaacactttctgtttctagcttactttactgtgagaatatacgatgtaataatacgacataaaatatatgtattaatcactgcttatgtgactgataatgctgcccatcaatagtaggctaagatgtggacaaaaagttatatgaggatgtacaactgctacaggagctggcacccctaaaccctgtttttttttttccagggccaaccatatcccctttccatattccaaatctttgaacagcacgaatgaccaagaaacaaatgtctccaattaaataagtggaaatgcgatgtcatccttacctacacaatccaggttcctgatggtttcctgcatcacatctttgtagagattcttctgacaaggacccagcaaagcccactcttctcgggtgaagttcacagccacatcctctaaagccactgaggcctgatccatcccacatgtacagaggaggaagggtgaaaatcacagtactgagaatctatactcacttcataaatttcacatgatgctgtggtttccaaccattttattcaatgacatggtaaacccactcttattctctgtctacactcactttctcctacacagtaactctgaagctacagttaaacatgtttggtaaattaacagtgggatagaaacatgccacttgttggcgaactgagtgagtgaatcacatagcctggatcacccctaatgttgatttccacagtgggtctgcagtccttggcacgataaagtcctactacttattgtgcaaaagggagttaccattagcagtgctgagactgtgtgtccttacaaatgctttttcacaaagttgggcttttcatggtatctagacagtgtatttaggggagggccccaggagcgtaactaataataggggtggagtgtgcctaaattgtttacgcaaaaaaaatacagtatttccttaaccccatcttccttctgagagtttggaattttgttacatactcagcacagggagtgcacctgatcagccactgctaggtttgaatggttgtcccctccaaaatgcacactgaatgttaatctccaaagtggcagtaaaaaaaaaaaagtgaggtttaagaggtgatgtagtcctaagggtttggacctcatgaatagattaatccgtaacgggtgaatgaataaatgagctatctcatgtccttctgagaagagtaagagatctgagctagacactcagctccctcaccatgtgatactctatgccgcctagggactctgcagagtccccaccagcaagaaggttctcaccagatgcccagccttaaccttggacttcccagcctccagaaatgtaaaaattaaatactgtttcttataaattaccgaggttcagtaattctgttatgaataacaagaaacaggctaagacagctacaaagaaacactctgggcattgggtctataatgaactttctgggtagataacatttcacgttttgttgcaacttgttatttgggggatttagcccatcctatgtgattatacttacagagaatatttggaagctggcaactagtttcctttagatcaaatgtactgaagtatgacaacagactgagaaaagatattacaccacctcaaaggaaaaattttaaacattttgagtaacgccaaaggggaaagaaagaaggggaaagactgcacatattcttagaaagaactcagtgtcatctctcatgaatatttataatacttactaagaaactaaaacaaatcttttagtagtcaacaaaaattacattaccaaatctaatagaactcacagtatctaaaaaatgctgaaagccttctcaccaagaaagtgcagcattccaaaaacaaataaaggattttatttggcaccccgtactattaacagagagataaatatatatataaagaaaaatgaaaactggtagaaaagtcttgtggagcttttatttgtccttggcccaatccctccccctatcaataccagtcttgaacacagcagcctgagttcccggtatagaaccctggacactaattctagagacagcatatcagatcttatttgcaaattattgccttgcattttccaatctgtataaggactatcccgaggtctgaaacaaagctgtctttttttttttttttttttgagacggagtcttgctctgtcacccagactggagtgcagccacacaaccttggctcactacaacctgactcccgggttcaagttattccacccagcctcagcctcctgagtagctgggagtacaggcatgctccaccacatccggccaacttttgtatttttactagagacggggtttcaccctgttggccaggctggtctcaaactcctgacctcaaatgatccgcctgccttagcctcccaaagtgctaggattacaggtgtgagccacagtgcccagccaaggccctctcttctactttatctacaatacaacacgatcagggtccaatttggcaggaactgcatgaaaatgttgcaaaatacacaaaaagcctgtagccaactggaagaacagactatgattaagacatacagtagaccaactaagtcatggagaaaaagagctgaagagaaaatgtcctccagatatcagggtactcaaaagcacccaggtatcctggggaattgagaaagccccatgcatgcacagtaaagaacacattttcacaaaagacaccggagaagaaaccctcattttcacttctggctgatctgtagctttaagtaagcagaacataaagcataagtagagtattaaacagcctggctaagtgttcaagggatgccccaggcacagagccatccacaaagactggaagaggtcaggcttttgtatgctttatcttttttactagcttctagcattcaggaaatctctgccagaacactggatgaacacacactaaagaacagagatgtcagtttctacaacaaataaggaatacagtctgtgcaaacatactttgaaaatgttattaaacaaatgaacaattacagtcttcaacacacataaacagaaaacagtgaggaaagaagaagaatccaattttcagaattaccccattataacattgagatgtctacttttcaacacaaaattatgaagaatacagaaaaacatgaaaatatggttcatcaattggaaaaaatataattgagataagccatctctgagaaacctcagacactgcactcactgaataaaaacgttaaaacaactatcttaaatatgttcaatgaagtaaaggcaatgatgaacaaataactaaaagaaaaccagaatacagatatagagataaaataatatctattaaaaagtagaaattaactgggcgtggtggctcacgcctgtaatcccagcactttgggaggccaaggtgtgtggatcacctgaggccaggagtttgagaccagcctggccaatgtggtgaaaccctatctctactaaacatacaaaattagctgggcatggtggtgcacgcctgtaatcccagctacttgggaggctgaggcagaagaatcgcttgaacccaggacgtggaggttgcagtgagctgagatcatgccactgcacttcagcctgggcaacaagagcgaacctctgtctcaaaaaaaaaggggtagaaatttagccatatagaatttatgcagctgcagggtacaactaaaatgaagacatcatcacaagtgttcaaaagatgtgagcagccaaaaaaaaaaaatcagttaaaatgatgataaaccaattgaaattaatctaatggggaaaaaaaaaggaatgaaattgagagaatgtgttactggtgtacttgtcttgccaataatgttaaaagaagttcatcagagagaagaaaaatgatacaggttagaaactcagatcatacacacacacacacaaacacacaaatatatacatatgcatatatatgaagagcattagaaaataattcaatgaaggcacaaaaattatttccttttcttattcctattggatatcataaaggtttgttcaaaaaataatatcaacaatgtattgggtggttatagtttataatagggcaaatggatgacggtgatgttaaattgggtgggagggaggaatgctgaacactgggttatataagcattaccccaaaagccagtacagtgttacttaaaactgaaggtccatttgttgtgaatggtttactccaaatgctagggaaatcaataataaaatgttaagaaacaacagcctgtcacagtggctcacccctgtaatgccaacactttgagatgcaagacaggaggactgcttaagatcaagactttgagtccacactcggcaacacaatgagactctgtctctaggaaacgtgtaaaaaaaaaaaaaaattagccaggcgtggtggcctgcacctgtagtcccagctactcaggaaagcaagtagggaggatctcctgagcccaggagttggaggttatagttaactatgattgctccactgcactctagcctaggtgatagagcaagaccctgtctcaaaaaaaaaaaaaaaaagaaagaaagaaagaaacaaagaaacaagtagacttaccatactattagaagaaaatacaatcatatagactcctcagttaaaataaaaggagacagaaaaaggaagttgaaaaaaaccgacaagtataacaaatgtaaaacaattatatatgtacatatgaatccaggtatatcaataaccactttaaatgtgtattatatgaatataccaataaaagaagacaaggactgacacagtagaaaaaaaacaagatccaccaatgtgtgcaagaaaactatttttttattctctcaagaaaactattttaagtagaaagacacaggtacattaaatataaaggtatgaaaaaatatactccattctagccctaatcaaaagccatatggggctgggcatggtggctcatgcctataatcccagcactttaggaggccaaagctggtggattgcctgaggtcaggagttggagaccagcctggccaatatggcgaaactgtctccactaaaaatacgaaagaaaaaaaaaattagccaggcatggcggcacgcacctgtagtcccagctactcgggaggctgaggcaggagaatcgcttgaacgcaggaggcggaggttgcagtgagctgagatcgtgccactgcactccagcctggacaacagagtgagacgctgtctcaaaaaaaaaaaaaaaaaaaaaaaattggtcttagctggaggtgggggcattggcctcaggcctctctgccatagtcaaagctactctcttacccttctatgctttacatggatatttaaaaacaaaatactcatgtttgatgaatccaggaaaatcactcaaattcagtgtttatgtctatgggtgggaaggaaattgtaaggcactgatattttatacctcaacaggaaaagcccaaatacctatcccttccagacaatgaatgtcatttaattactatttccatgatagtaagtgatacagttaaaaataattatattttacttctttagctgttggaaagtcctgtcccacagaatttagcattcatctgtcaaacccatataacaggaacagaacagatttctccattgtcccaaaatctccacccttttaaaaaggagaactgaacttttgttaaatccttttaattcaatgtacctactacactttcttgtaaaaatgtattccttttttgcagccataatggaagagggttttttccttggtagtagttatactactaagtcctgaaattccatctgaaatcatccaaaaaacaaacacacctgagaaacatactacacaagctctggggcaaaaaaaataaataaaggtttttaaaaaatggaatagaagattacatataccatttatattctgaaatccaactctttctagaattacttatacaatttattttctgaagtccaactctttccaactttgggtatactttgtcttcaaagtatacaataacaatctctaatcataggatgtattttaaggttaatcaaaaatttaggctgaaaagagtaaacatatcttttcaagctaacaaactcaggaatcagcagtgctgactggaacacagaaaagtctaatgcaacaatcagggtgggtcatcctatcacctgggacatcccttaaccctattctggtcatcaccctcccaggagacactgccttgtgtgcttttcaggatcttgcactacctcaacgggcaggttctccagtccttagatataactttctaccttttaagtctgagagagtccagaaggcaaaaatcatttctgtttttttttcctatggaatatgaccatgaaattggctgttcagtcatgtgtctccaaggaatggaaactagggttgggaagaaaaggtgagtgtcccaggagttagctttttacaggaattatataccagaagattcctcccatcccagtggatccagttgctccccagggggccacaccccccatctcaggctgtcccctgggaggagtgacccaggggatgatattcactagaccctccaagagacttggcagctgtggacacccttttttttttttttttttgagacagggtcggcctctgttgcctaggctgggatgcagaggcacgatcatagctcactgcaacttcaaactcctgggctccagccatcatcccacctcagcctcaggagtagctgcgactacaggtgccagctaccaagcccagctaattttattattatcatttatactagagacaaggtcttgccatgttgcccaggctggtctggaactactaagattaagcaatacctctgccttagcctcccaaggtgctggaattacaggaatgacccaccgtgttcaggaacccaaaataattctttcaagaaaaagccatacattgctagctgaaaacaagatgacaaactagtgaaatatcgcctgggggccaaacagttcataccgttgctgtgaattaaggacagaaggttagcctggggaagtctctggaaaccaagagatttgctgccagccctaggaggagtcaggatgagagaacacagtggtggatttgagaccctgctaaccacatctttggaagactcagaggggaaacggtcgcccttggaaagaaagaagggactgaggaccacggagaccacagctcctcccacacacaaaccccacacacgagtctggattccacctggtgactcgtcgtcaccgtgcagcctcctcaccgggttcacaggaactgcgagccaggctggaggcgagattgcagttagatattaaccaggtgccctcagccccgctgcctcaaggggccgcctccctgagagtcaggtcacagcagacgctgaccgccggcttccccattgtgcctggggataagatctctgagaactgctcaagagtcgccggagttctcagatcctgaatcccagcaaaggctggcgccaatcaggttgaagtcccaacgagggagcccattcagcagaatgcggtttcttcacctcctgtcccaggattcacccctcacttccccaccaaccaacgaccctacacccagccgcccccgtccagaccccaaatccctcagggaggcggatctggggtgtcctcccctctctggctattaaactgtttctgctgcagccctcagcgtctcggtgcagtgagtcgggccgcgaacctgtgttgcttacagccgcacaatctcgggagacgcgaggctgcgggcgcggagctgcccagagagggcgccggggccgcagtcgccgcgcaggaacgggacaggacgcccggggtcccggctgcatgcccagccccaccctgcggccgagggccgacctacgccaggggaacccgggtccgtagatcccggagtagcccttggggaggcccgggtccagccacagccgattactgcaggttccacccagcccctcccccgcctcgggacgccggcccagcacacgcaccatttcccgacttccgcggtgtcccaggtcctccggacggctcccgctgccaatgcgggttcccgcgggacacaggctgccacggaacttccaggtcgtctcttagctacagagccgagcaccgagcgcccagcgcaggtgggtggagaagacgccgcgggctttttcaaccacacactcctctgggaagcgcgcctgattgacagttcccacgaacccgccccacggcccttactggatacggcgtcaggtgccgcccctcgtggactgattgacagaagaagcgatcttgcacagctgagtggagccagatgagcaagttcctgacacagcccttggcagggcgggcttcctccctgctctttgatctgaatcctcccgagggatatttgcacttaagcggaatttcctgcctgtactcaataggacctcctgcttcttcctcctgtacactgactgacaaaacaattatacttttttttttttttttttttttttttccgagagagagagagagagagagagagagagagggagtcttgctccgtggctcaggctagagtgcaatggtgcgaggctcactgcgacctccgcctcctaggtgggttcaaacaattctgcctcagcctcccgagtagctgggattacaggtgcgcgccaccacacccggctaatttttgtatgttttagtagaggccgggtttcaccatgttggccaggctggtctcgaactcctgacctcgtgatccgcccaccttggcctcccaaagttctgggattagagacgtgagccatcgcgcctggctccaattatactctttttcaatgaaatttttcaaaatatttcaatgtacaattaaattattttttactatagtcactctgttgtgctagcaaatactaggtcttattcattctttgtaactattttttatacctattaaccatccccacttcccccataactactcctcgctactacttttcccagcctgtggtaaccatccttctacacgtttttggttgtttgagatggggtcttgctctgttgcctaggctggagtgcagtggggccatcatggctcactgcaacctctacctcccaagctcaagcaatcctcccacctcagcctctcaagtagcttcagattgttcactgttggcatataaaaatgttactgatttttgtatgttaatattgtatcctgcaactttactgaatttatttctcagttctaatacttttttggtggagtctttaggtatttccagatataagatcatattatatgcaaaccaggataatttgacttcttcctttccttcccaatatagatgccctttatttctttttttttttttttttggacttattgctctagctgggacttcgagtactgtgctgaacaacagtggtaaaagtgggcattcttattgtgttccagatcttacaggaaaggctttcagtttttcctcattcattatcatgctagctgtgggtctgccatatatggcttttattatgttaaggtagctgcttctatacccagtttttttttagggtttttatcatgaagggatgttaaatattatcaaaagctttttcagtgcacattgaaatgattatatggtgtttgccctttattctgttgaaatgatacatcacattgattgatttgcatatattgaaccatccttgcatcccagggataaagcccacttggtcatgatgaatgatctttttggtgtattgttaaattcagtttgctagtattgagttgaggatttttgcatcaatattcatcagtgacactggcctatagttttctttttctgacatgtctttgtctggttttggtgtcaaagtaatattggctttgtaaaataagtttggaagtattgccttctcctctgttttggaatagtttgagtaggattggtattagttcttttttaaatgttagtagaattcagcagtgaagccactgggttctggggttttctttgctagcagactttttattatggctttgatctcattatttgttattggtctgttcaggttttttatttcttcatggttcaatgttgctatgttctatctgcctaggaatttatcaatttcttctaggttttccaatttattggcatatagttgttcttagttgcattaatgatcctttgaatttctgcagtatcaactgtaatgtctcctttttcatctctaattttatttatttgggcctttctgtttttttcttagtctacctcaaggtttgtcagttttgtttgtcttttcaaaaaaccaactttttgtttcattgttcttttctattgtttcttcatttcaaattcatttatttctactctgatttttattatttcttttctactaattttgggtttggtttgctcttgcttttctaattctttaaaatgcattcttaggttgtttatttgaaggttttcttcttcttcttcttcttctttttttttttgatgtgagttttacttcactcttgcagcctaggctggagtgcaatggcgcaatctcagctcactgccacctctgcctcctgggttcaagcaattctcctgcctcagcctcccaggtagctgagattacaggcacccaccaccatgtctggttaattttttgtatttttagtagacagggttccaccatgttggccaggctggtcttgaactcctaagctcaggtgatccactcacctcggcctcccaaagtgctgggattacaggtgggagccaccgcacccagcctgcaggtcttcttcttttttgatgtaggtgcttatatctataaacttccctcttagtactgcttttgctgtattccataggttttggtatgttgcattttcattatcatttgtttcaagcaactttacaatttccttcttaatttctccactgaccaattggtcattcagaagcagattatttaatttccatatgtttgtatggtttccagaattcctcttgtcattgatttctagtttattccatgtattctatgacacaatttaaattatttcaatttttttggagagttttaagacatgctttttgaactaacatatggtctatccttgagaatgatgcatgtgctcgggaaaaatatgtgtattctgtagctgttggataaaatgttctgtaaatatctattagatccatttgatctatagtgtagattaaatcccatttaatctttcttttgtctgatttttcagtatatattgagataatctttgtcgatttactgtctggaagatctgtcctgtgctgaaaacggggtgttaaaatctccagctattattgtattggtctctctctcttttatttttatttttatttttttttgagacagagtttcactcttgttgcccacgctggagcgcaatgttgcaatcttggcttactgtagcctcctccacctcccaggttcaagcagttctcctgcctgctgggattacaggcgtgagccaccatgcccggccctcagtgccagtcttaaagacagcagcccgagatcccagtataaaatcctactcactcaattatcacctttgtattttcgaattggtatggggactttccaaaggtctgaaacaaggctctctgttctatatcatctacaataactcagtccctgtcaaatttggcaggaattgcctaaaaatgttgtaaaatacatcaaaagcctgcaaccacctggtaaaacggattatgattatgacataccatctctgatggttaatactgagtgtcaacttgattggattgaaggatacaaagtattgatcctgggtgcctctgtgagggtgctgccaaaagagattaacatttgagtccctgggctggggaagacagatccaccattaatctggtgggcacaatctaatcagctgccagcgaatataaagcaggcagaaaaacatgaaaaggagagactggcctagcctcccagcctacatctttctcccatgctggatgcttcctgccctcgaacatcagactccaagttcttcagttttggggcttggactggctctccttgctcctcagtttgcagacagcctattgtgggaccttgtgattgtctaagttaatatttaataaactcccatttatatatatatatatatcctattagttctgtccctccagagaaccctgactaatacaccatctaaatcctgggggaaaaaagttggagagaaaatttcctctagtaaactagggtactcaaaagcactcaggtatactggggaattgagaaagccccatgcatgcacaggaaagaacacattttcacaaaacacatgataaaaccctaattttcagctctggctgatccctaggtttaattaaacagaaaataaatgctaaagtaggattttaaacagcctgactgtgttttcaaggaatgccccagtacagagccatccacaaagactgaaagaggtaaggtttttgtttgtttcatcttcttctttacttttagcttctaacattccagaaatctgtcagaacactgaatgaacacagaggaatagacatcagtgtctacaatgaatagggactacagtctctgcaaacacagtttgaaaatgttactaaacaaattacagccttcaacaaacataaatagcaaagagtaagcataattttgttttgatacaaacaaaattatgaagaatacagagaaacatgaaaatgtggctcattgatggaaaaagtttaattgacatagttcatctctgagaaacctgacactggacttactgaattaaaactttagagccgagcgcgatggctcatacctgtaatcccagcactttgggaggccgaggggggcagatcacaaggtcaagcgattgagatcatcctggccaacacggtgaaaccccatctctactaaaaatacaaaaattagctgggtgtagtggcatgcgcctgtatacccagctactcgggaggctgaggcagaatcgcttgaacccgggaagcggaggttgcagtgagccaagattacgccactgcactaatgtctggtgacagagttggactctgtctcaaaaaaaaaaaaaaaaagaaaaaaaaaaaggcccggcgcggtggctcacgcctgtaatcccagaactttgggaagccgaggcaggcggatcacgaggtcaggaaatcgagaccattctggctaacacggtgaaaccccatctctactaaaaatacaaaaaaaaaaaatagccgggcatggtggcaggcgcctgtagtcccagctacttgggaggctgaggcaggagaatggcgtgaacctgggaggcggagcttgcagtgagccgagatcgcgccactggactccagcctgggcaacagagtgagactccgtctcaaaaaaaaaaaaccaaaaaactttaaaataaccgtctcaaatatgttcaacaaggtaaaagcaatgatgaataaagaactaaaagaaaaccagaaaacagatgtagggataaaataatattaattaaaaagtagaggcctggcgcggtggctcatgcctgtaatcccagtactttgggaggccaaagtgggcgaatcacgaggtcaggagatcgagaccatcctggctagcatgatgaaaccccgtctctactaaaaatacaaaaaattagctggacatggtggcgggcgcctgtagtcccagctactggggaggctgaggcaggagaatggcgtgaaccccggaggcggagcttgcagtgagcggagatcgcgtcactgcactccagcctgggcgacaaagcgagacttcttctcaaaaaaaataaaattaaattaaaaaagtagatattgagccatatagcatttatgcaggtgcaagatacgacaactaaaatgaaaacatcactacaggtgttcaacagttgtgactaactaaagaaaaacatctaaaatgaagacaaaacaactaaaattacccagtctgagagaggaaaaaaggaacaaggatgagagaatgtgtgactggtatacctgccttgccagtaatgtcaaaagaagttcatcagagtgaagaaaaaggatacaagttagaaatttgggctggctcagtggctcatgcctataattccggcactttggaagacccaaatggtaggattgctggagcccaggagttcaaggccagcctgggcaacatggtgaaactccatctctataaaaaataaaaaattagccaggcatggtggtgcacatctgtgatacaggctacttggaaggctaagacaggaggttaacttcagcccaggagatggaggctgcagttagctatattcctgtcactgcactccagcctgagtaacaaagcaagaccctatctaaaaaaaaaaagagagagagagagaaaaaaaaagaactagaacaaattctggtcacacacacacaaacatatatacacaaatacatacaaacatacatatgcaaactacataaaatatatgaaaagaattaaatgaaggcacaagaaaactctttccttttctagttcctatctgatgtaatagatgtttgttcaaactaataatatcaacaatgtattgggtagtttagcttataatagggccaatgaatgacagtgatgttatctgggatacgagggaggaatttggaacactctgttatacaggcactataccagaagccagtatgatgctttgtaaaactaaaggtccattcattgtgaatggaatactcaaactctagggaatttactggtaaaatttaagaaacaatagctagttgggtagctcatgtgtgtaatcccaggacctttaggaggccaaggtgggaggattacttgagcccagaagttcaagaccagcatcagcaacatagtgaaaccctgtctctataaaaattttaaaaatatcttgggcatggtggcacaaactgtagtcacagctactcgggaggctgaggcagtgggatcttgagcccaggagtttgagatcacagtcagctatgattgtgccactgcactccagcatgtatgagagaccctgtctcaaaaacaaaaaagattctgtctcaaaagaaaagaaaagaaaagaaaatgaaacaagtagtatagtataataagtctacttactctacttccattttcataaaatttcatttcacatagtaatagatttactatactaatagaagaaagaaagaaaatggaatcatattaaatgctcagttggaaggaaaggaggcagaaaaaaagaagttgaaaaaacagacaaacataacacaattacatatgtacgtagtaatccaactatatcaattgccatttaaacatgtattatctatagataccaatataaaacaaagattgatagagtagaaggaaaaaacaagacccatgaatgtataaagaaaactattttaaatagaaagacacagatacattaaatacaatggtataaagaaatatatgccattttagccctaatcaaaaggaatatggaacaggctacattagactcagataaatcaggttgtagatcaaggaaaattacaagagatagagatatttcataatgataaagtgctcaatcctagagacataataatccttgatatgtatgtccagaaaatagagcatcaaaatgcataaggtggctgggtgtggtggctcacgcctgtcatcccagcactatggaaggccgaggtgggtggatcacctgaggtcgggagttcaagaccagtgtggccaacatagtgaaaccccatctctactaaaaatacaaaaaattagctgggcgtggtggcaggtacctgtaatcccagctactcgggaggctgaggcaggagaatcacttgcactcaggaggcagaggttgcagtgagccgagatcgcgccattgcactccagcctgggcaataattgtgaaactccacctcaagaaaaaaaaaaaatgcataaggcagcagtccccaacctttttggcgccagggactggttttgtggaagacaattttcccatggaattgcgctgtaggggaatggtttctgatgaaactgttccacctcacatcatcaggcattagattctcataaggaacgcacaacctagatccccttgcatgtgcagttcacaacagggttcgcgctcctatgagaatctaataccgccactggtttgacagcatgtgcaggcggtaatgcttactgcctgccgctcatctcctgctgtgccacccggttcctaaccagctacagaccagtactggtccacagcctggaggctggcaactcctggcatacggcataaatttataaaactgcaaggcaaatacacaaatccataattatagttgaaggagaacaattcccctctatcaataattgatcaattgagtagaaaaatcactaaggacatagctgaactcaacagcatcattaatcaactggatttaattcatatgtatttatagaatacttcactcaacaccagagtacacattcttctccaaactacataacatattcaccaggatggactatattctgagccataaaacctaccttaacaaatttaaaatagatattctgtaaagtatgcaatctaaccatattagaattaatctagaaaccagtaacagaaacacagttgaaaatcttccagaaagtcgacatttgaacaacaaacatccaaaatacatgaaagacaaaccgaactgtcaagagaaatttaaatattctgaagttgatgagaaaactatatcttagggccaggcacagtggctcacgcccataatcccagcactttagaaggccaaggtgggtgaatcacttgaggtcaggagttggagaccagcctggccaacatggcaaaaccctgtctctactaaaaatacaaaaaattatctgggcatggtggtgcacacctgtagtcctagatactcgggaagctgaggcaggaaaattgcttaaacccgggaggtggaagttgcagtgagctgaaatcatgctactgcactccaccctgggcaacagagtgagactgtgtctcaaaaaacaaacaaacaaatatatatatatacatacatacatacatacatacatatacacatacatatatatacatatgtgtctgtgtatatatcaatgtctgtgtgcatatatatatatatatatatatatatatatatatatatatatatcttagccaaaaacacttttcatagagatgagatctatattccccaggctggtctcaaattcctgggctcaagtgatcctaccaccttggcctcccaaagtgttgggattacaagcatgaaccataatgcccagccttagcgaaatgtttgaaatgtagcaaaggcagtgtttacagggaaattcaaagaattgaatgcaaactctggaaaataaagatctaaaatcaatgctccattttgagaaactaaagttccattttgagaaactaaagaaagaactccaagataaatcactcagaggaaaattacaatgagaatatattaatgaaattgcaaacaagatatcaattaaaaacatcaataaaatcaagagctagttctttaaaaagaccaagaacattgctaaacccacagccaagccaactcagaaaaaaaaagggggccatcactactattcctatgcacattaaagtgaccataagggactattcagagcaattgcatgtctacagatttgtttaattacatgaatgggccaattccctgaaagacaaaatctaccaaaactcacaaaattagacccatgtaatacgaacgggcataatctatttaaaaattggaatcactaaataacaaatgtcccaagaaaaaggaaccagaccaggatggtttcactggtgaactctggcaaacacttatggaagaaatgacaccaattttctacaatctcttctgaaaaagagaagcagagagaaatcatgttataaggccaacattgcccttgcactgcaactagacagatgatacagacatatctccgccatgtaagaatataaaaggaagactgctatctgcaaaccaagaagcaggcccttactagagacttcatctgcttgaacttggaaacccagcctctacatctttgagaaatgtttgttgtttatggtatgcagcctgtggtaatctgttataatagcttgaggtgaccacacatcaaggctttgaagtctatagtaatgaggagagtatggtattaaccacaatgactaaaagagaaaccaatggaaaatagccaattctaaaacaagatcaccaatttaagacacaagaacctatgacatgcaggtattagcaggcaacgatataaatgggagacacttcaacacaaaagacagggacaaatggttatcttcaagagaaaaatcaattttctgctcatcatcttcacatacaataatcaactcactatacacctacctgttttgtgaattcttattcacttgatattgccccagtttccattttggtttttcgtttttgttttttttgaggcagactctcactcactctgttgtccaggctggagtgcagtggctcgatctcagctcactgcaacctccacctcccaggttcaagcaattttcctgcctcagactcctgagcagctgggactacagatgcgcaccaccacaccccgctaatttttgtatttttagtagatacagggttttaccatgttggtcaggctggtatcgaactcctggtctcaagtgatctgccagcctcagcctcccaaagtgctaagattacaggcatgagccactgtgcccagcccagcttccattttgaatttgctttgaacactctccaagcagaaaatgggtttgtaatctcagatacactttcttgttctctacctcctcctccttcctcaatgtggttgatccagatatctcccttacgtaaccatctttctgtcaccatgtccctatgggacagctaaatacaacttgcctgactcaccccccacagcccacatggactgcagacatgtgtagcagtgaccacctctcagtcaaagctggactctggggaacttgcgcatacttccttttaaacacaccaattagaactccccaagagaagcctggttgggtaacccctgggccccaataaaggcttcagctcatgagtccccctccctctcttgttccgcacatactggtcaagtgtccatgtaactcaagaccgctaactcttggtcttcaaggcatgctaatctcttctgtctaggatgtctatgtaaatgcactgtttctattatttcctgtattttgttgagttgccttttctatgtcgcacctgaccaacacatctgaacctaagttctatccagatcaaagctctctttgtaggattgtcttggctgcggctgtcttggtagaaataaaataaaaatttgtcagaaaaaaaaaaaacccacgaaatgtcagcaaaaacaagtgttcttgaagaggaacacttggtcactagtctgacatttaggcattattaggccccgaccaggaaaaagaaaaacctaaagggtcacatttggctggcttccaaattaatctacctgggggaggtcttctgatccacggcccacatcctgtccctgagtaaacaatcttatcctgggctgggggtggtggttcacgcctgtaatcctagcactttgggaggccaaggcaggcagatcacctgaggccgggagtttgagaccagcctgaccaacatggagaaaccctatctctactaaaaatagaaaattagccaggcatggtggtgcgtgcctgcctactcgggaggctgaggcaggagaatcgcttgaacccgggaggcagaggtgatggtgagcggaggctatggtgagccgagatcacaccattgcactgcagcatgggccatagagcaagactccgtctccaaaaaaaaaaaaaaaaaaaaagaatcttatcctgagtccctcaaatcatattgtgagttcttcaaactgctgatgctctcattaacatgtaacctactgacatcaaaaaggatcctgattcgtttctaaatcatgaagttttcctgattgtcttccatgtagaaccttttagcctgtatgttgtcatgtgtaaccaatgtttataacctctgaattgtaccctccaatgaaaaggacaattcaccaatgaggagtccccctcccttctcctaaaggttcttaggaaagcgtctgatttgtaatggaggttggaacacatccaaatttgctggtgtgtcttcctgggtcaatcctcaaatttgaccagtaaacctacataaaatgacttctacctcaatagccttaatttaggtcaacagaaggctctcagaaaggcacaatttcagaaaatgaaagcccacaagggaaaaatgttctgcaccaatgctaatcagtaaaaaccaatatatactcatatggagataaataaaagataagtctttgtaaggaataaacacacacatgcgtacacggtcagacaggtaatgtacacatgccattagaatttcttagaaaacttaaattcatccataatctacgaccagtagtgggaatattgaggagagaaagttaccccctggggaaggctctggaaaccaagggacttactgtgacccctataaagagttaggttgaggagacaggacggtggattagacaggatggtggacttcagactctgctgtccaggggaagggtccgcagaccgggtagtcgcccgtagggaagtctgggtcctgccccagctggtaacagctggttccaaccaacccctcctcccgtctccggacccctaggccgtgcacacgcaccatttcctggcttccacggtgtcccggggtcttctctacggctcctgcggcctgtgcgggtcccagtgtgccagaggctgccacagaactttcagggcgtctcttagcaacagagctgggaaccaagcgcaaggagtggagaagatgccctgggctcttggaacctcacagcctcctcgcggcagctcccttattcacagttctcacgaccccaccccacgtccctgattgagtagtgtaccatgtcctgccccctggggaactcagtgacagaagaaggtatctcttggtgctgagtggaggcagaaaaacaggttccagacccagaccctcacagagcgatcttcttgcctagtggttcctagtgctgtgaccttatcccgcccctggggacatttgcatgtgggcataatttcccacctgtactcaatgagctcttactacctcttcccctggacagatcacaagtctgtgctgggaatcccagaccactgtccagtggagccatcccctagcctcagagcaggaggggagcccaagccacacaggccaccctgcagcaggagggaaggcctgatatcctccagggatcaggaatttcagatggggctgctggcgacatggccaagcctttctcccaccttatctctcaatctactcattttcagctcataaaagcacatcaacaatgaaataaaactgttacatgcatggaaaaactggaattataaggcaacagtcttctataaaggaatcaaaagagaagaaaggaagaaacatgaactagctcaaagcagcagcctgctgaacccacagttcacaagcaaactccctttcaggaggtcaaacagattcccaagcttaggagccaaactctgactcctgaaacaatctagtgatgaggcagggacatggaagcatttaacttttggcactcaactcgccctcctatcctgcttgcacactgtggaaacactcctttcttcaacactttaaatgttaacgaattaaacgctccaatcaaaacctgaaacattagactttgaatctgaaaacatgagttttgccatgtttttaaggaccagacataaaagcattgtgaggccaggcgcagtggctcatgcctgtaatcctacctagcactacgggaggctgaggcgggcggatcagctgaagtcaggagttcgagaccagcctggccaacatggtgaaaccctgtctctactaaaaatataaaaattagctgggcgtggtggcacgtgcctgtaatcccagcttcccgggaggctgaggcaggagaatcgctggaatccaggaggtggaggctgaagtgagctgagactgtgccattgcactccagcctggtgacaaagcgagactccacctcaaaaaagaaaaagcatcatcaactgaaaggtggaatccattgctaaaagaaaggaaccaaacatgaggtgtcatcagattaaatgaaatcttctatttttaaaaactgtagcttttcctgacagggaaaatgggcatgtttggcaaataagaaataaatgatgtctgattataactcatcaacaaataattttcatgtcttaaaaaatgacatacacacacacagtctattatcacaagattttgttccctccttgaaggataaactactgctctgcaagatgctccacccttcactcctcacattaactgctgctagcatatttatttgttccaaaacaggtataaaaagagggttcagtgtgtcaaactacatgattgttagaggtttatgtacagattttgtatatttttacaaactgcaccagttaagtagttgatttatgttgtttttgttttttgtttgtttttagacagagtctcactctgttgcccaggctagagtgcagtggtgcaatttcggttcactgcaacctccgcctcccaggttcaagcgattcccctgcttcagtctcccaggtagctgggattacaggcatgcatcaccactcccggctaattgttttttgtttttagtaaagacggggttttgccatgttggccaggctggtctcgaactcctgacctcaagtgatctgcctgccttggcctcccaaagtgctgagattacaggcatgagccactgtgcccagcctactgtgttgattcttacaaaagctctagtacaaaaataaatgttcacgttaccatgatgaaaaactcaggaatggtgactcctcgattcctctgaaaaacaattttttttaaccctaagagaagctaggaagtctacagtaaatggctggaggtgatccctgagagaacacattttagtggaaaaggtcactcatggaaaataccaaaatttatatgtagcagtttaaatatactacaggaaacactgcgattacattcttcagttacctctatgacagcatgatggtttttttttaggtagggtgtttctttttggttttcttttaaaaaagaaaactgtaggctgggcacagtggctcacgcctataatcccagcactttgggaggccaaggtgggcatatcatgaggtcaggagatagagaccatcctggctaacacggtgaaaccccatctctactaaaaatacaaaaaattagctggtcatggtggcgggcacctgtagtcccaactacttgggaggctgaggcaggagaatggcatgaacccaggaggcagagcttgcagtgagccgagatcacgccactgcactccagcctgggcaacagagcgagactccatctcaaaaaaaaaaaaaaaaaaagaaaagaaaactataaatctttccccacaactgtaaatctttctcattcatagagatatcttcctaaatgtgctactaaacttatatttatattttcaccatttcagtgtgacttcattttaatgcatgctgttataagggtctcagttgctcttctctgcaggtcaatatctgttgcgggaagtcagggacaccaaatggagggaccggctggaaccgtgacagaagaacataaattatgaagatttcatggacatttatcagttcccaaaattaatacttttataatttcttacggctgtcttcactgcaatgtctgaacataaattgtgaagatttcgtggacatttatcagttcccaaatgatatttttataatttcttatgcctgtctttaatctcttagtcccgttatcttcgtaagctgagaatgtacatcacctcaggatcactattgtacaaattgattataaaacatgaaatcagtgcaccttaaaaaagaacagaataacagcaattttcaaggaacaagggaagataaccatatggtctgactgcctgtggggtcgggcagaatagagccatatttttcttcttgcagggagcctataaacggatgtgtgagtaggagaaatatcactgaattattttcccagcaaggaataccctggggaaggaatgctttcctggggggtggtctataaacagcaactctgggagtgtctgtcttacgtggttgagataaagactgaaatacacactggtctcctacagtaccctcaggcttactaggattgagaaattccagcctggtaaattttggtcagaccggttctctgctcttgaaccctgtttcctgttaagatgtttatcaagacaatatgtgcacagcgggacatagaccctcatcagtaattctaattttgcctttgccttgtgatctttatcaccctttggagcatgtgatctttgtgacttactccctgttcacacatcccctccccttttaaaatccctaataaaaacttgctggttttgtggctcagggtcgtcatcacggtcctaccaatatgtgatgtcacccgtggaggcccagctgtaaaattcctctcttcgtactctttctctttatttctcagactggccaacacttaaggaaaatagaaaagaacctacactgaaatattgggggctggctcccccgataaatatccaattttcctagcaccctgttgaaaagactttccccattcatgtatcttggcctatttgctgaaaatctattaacggtcaatgaagggtatctttatctgtttctgctgatataatgaaatactatagatggggtaacttataaggaacagaaattggccaggtgcagtgactcatgcctgtaatcccagcactttgggaggctgaggtaggtggatcacctgaggtcaggagttcgagaccagcctgaccaacattgagaaaccccgtctctattaaaaatacaaaattagccggtcatggtggcgcatacctgtaatcccagctactcagaaggctgaggcaggagaatcacttgaacccaggaggtggagtatgcagtgagccaacatcacgccattacactccggcctggacaacaagagcaaaactccgtctcaaaaaaaaaaaagaacagaaatttatttttcacagtcctagatactgggaattccaagataaaggtactagcatcgggtgagggccttcctcttggatcttctggagggaagaaatgcttgcatcctcacagggcagaagacagaagggcaagagagggcaaaccccatccatcaagcccttgtagtggcattagtttattcatgagggctttgccaaaaggccaaaggcctgcctcccaaaactgtttcactggggattaaattctaacctatgaattttgcaggggaaataagcattcaaaccatggcaaaggggatgatttctggactctcagttctgtcttactgatctgtgtatcagacatttttccagtaggtctggctactatagtccttgacctgatgatggagagctccaccccattccacatgattgtcatgcacggatagaaatggtcctaaagcctccagaagatctccttgacatactcttagacaacatagacttacttctattttgggatagctcctgtaaatgaattgttaaggaaaacataataatgggttatgcaatattttctttctttgttttttgagacagtgtctcactctgtcgcccaggctggagtacagtggtgtgatattggctcacgcagcctctgtccccctactcaagcaatcctcccacttcaggtttccgagtaattgggatgacaggcatgcaccaccacactcagctaattttttaactttttataacaacaaggtctcactctattgcccaggctggtctcaaattcctggcctcaagtgattctcctaccttgatatcccaaagtgttgggattacaggcatgagccatcatgcctggcctaggcaatattttctctacatgaaacacttgaggcatactcttcactcactgtaaaatcagtatgagcctagagctcatagctcttactacatcttgcacgctgacaaacaggaaaactgcctctactgacacagactgcagatatgcttttggaattccttatgcaactggcacaatttgaaaaatttgtggattcacaacttgttctggtatacccactgccgatagacacataactgggctactattttttttttttttttttttgagatggagtcttactgtgttgctggggctggagtgcagtggtgtgatcttggctcactgcaacctctgcctcccgggttcaaatgattctcctgcgtcagcctcccaagtagctgggattataggtgcccaccactatgatcagctaatttatttttgtatttttagtagagacagggtttcaccacgtgggccaggctggtctcgaactcctgacctcgtgattcgcccacctcggcctcccaaagtgctgggattacagaggtgagccaccacgcccggcccataactggtgaactattacagatgatttgcctccctattaaaatggccactgttcactgtctagtccatactacggagatttatactatatctctagggaatgatagggctcaaaagattgctaaataggaagccaaaaatggtaccttgttctttcccaatccagtttgcaaaactgcctttacccgtgactgatattatcaagtaaatgtcccataatctaagaagatctatagatacaaaagggaaaaatagtattgtagagattatacattaggccagtcacactccctgtgctattaatactttccttcaatcttttcccttacacaaatctctcaccaagttggacatagaggcagatgggaaagagttaagaaaacgaaagacaactgactggcctggcatctacaaaattactgacccacttatttctcagtgcattacttgtaacccacccaatttctggatgaagctcacaaatttcacagaatcctccaacacccacactgaccctcccagccctccaaatggatggtttatctacaactgtagtcaattctcattgtttagtgattgtctccatgtttagtggatgggcgcaatgctatacagctagacatgatgatgccatcagtggtaaataattaatcattgaaattattcctggttttagtattcttttgtggacagaacaaaaccaatgaggtaattttatatgtgctgctgaagcgagcacaaccaaggaggtaattttatagctgatataaaccacattcttgcaaaaactacggaagacttattaaaatacataccatccttaaccatcagagcaaagagaatataaaaatctaaacataaaaaggactttagagaaatagctgtcaaaacactggacttcaatggccagaagcattagccctggcccttataaaaatctgaaatactaccaacagtagacatggattatctccttttctgtagtttttgggttttggttgcactgtagctattggtatatctaaactttacattcctggattgagtaaatattcttgggaatgaagtgaacaatatgatgctatgactagctacatgtaagaactaaccagtggccgggcatggtggctcatgcctgtaatcctagcacttcgggaggccgaggcaggcagatcgcttgaggtcaggagttcaaaactagtctcgccaacatggtgaaaccctgtctctactaaaaatacgaaaaagttagccaggcatggtggtgggcacctgtaatcccaggtacttgggaggctgaggcaggagaatcgcttgaacccgggaggtaggaggatgcagtgagctgagatcatgccactgcacttcagcctgggcgacacagtaagactccatcaaaaaaaaaaaaaaaaaaaaactaactagtatatttggagcatgtcatcaacaggttaaaaaaaatgccatcacttttgaccaaaagataaggtatttccaggtgtggtggctcaggcctgtactcccagccatttgggaggccaaggtgggaggataacttcagtccaggggttcgagaccagtctgggcaacatagcaagaccctgtctctgtaaaaaaaaaaaaaaaaattagctgaatgtggagatatgtctcagtagacctagttactcaggagacagaggcaggagcatcacatgatcccagagtttcaaggctgcaaggggctgatcatgccagtgcactgcagcctgggcaacagactgagaccttgtctataaaaaaataaaaataggtcaggcacagcggctcacgcctgtaatcccagcacattgggaggctgaggcagctggatcattcaaggttgagagttcgagaccagcctggccaatattaaaccccatctctacttaaaaatacaaatattagctgggcatggtggtggacgcctataatcccagctactcgggagtctgagacatgagaaccacttgaacctgggaagcagaggttgagtgagccgagattgcaccactcctctccagcctgagtgacagagtgaaactgtgtcttcggaaaacaacaacaacaaaagaatattattcaggcataaaaaagcaatgaattactgacatatgctaccacatggagggaacctgaaaacatgctaagtgaaataagccagacacagaaggacaaatattgtatgctccacttatttatttttttgattcgtttttttgagacagagtctcactgtcacccaggctggagtgcagtggtgcgatctcagctcactgcaacctctgcctccatggttcaagcgattcttctgcctcagcctcctgagtagctgggactacaggcgtgcaccaccacacccagttaagttttgtattttcagtagagacggggtttcaccatattggccatgccggtctcgaactcctgaccttgtgatccacctgcctcagcctcccaaagtgctgggattacaggcgtgagccaccacgcccagccctagatgctccacttagtcaaattcacagagcaagagagtagactagacgtcatcagggattgagtgtagagaagggaagttgttttttaatgggtactgagtttctgtgtggagcgatgaaaatctagagataattagctgtaatggctataacacattgtaaatgtatttaatgctcctgaatgacacacttaaaaatgattaaagtggaaattttatgttagtacatgttacttcaagacaatttatgaacaaaagaaaagacacaattcaagctactatatatgaacacaacaatatctagaagcactggatggaggttggtgtggtggcacatgcctctagtcccagctactcagagcctgaggtggaaggatcgcttgaactcaggaattcaagcccaacaggggcaactagtaagaccctgtctcttaaaaaataataataatgataataataataataataatgcactgaatggacaaaacagcagaggagatattgctgaaataaagataagtgaacctcaaaaactaggagtataaccgatttaaaatatagcactcagacaaaaaaatgaacagaacctcagtgagctgtgtaatgggacaattgtacaaggactccttgaaagacaggagtaaaaacagaacaaacaaaaaatatttccataaatatttcaggccgagcacaatggctcaggggtttattgagctttttggatctctaggtttatagttttcatctaatttggaaaatatttgctgtaatcccagcactttaaaaggccgagacaggcagatcatgaggtcaagagattgagaccatcctggccaacatggtgaaaccctgtctctactaaaaatacaaaaattagctgggcatggtggcacgcgcctgtagacccagctactcaggaggctgaggcagaagaatcatttgaacctgggaggcggaggtttcagtgagacaagattgcgccactgcactccagcctggcaacagagcaagactccatctcaaacaaaaacaaaacaaaacaaaacaaaacaacaataacaaaactagcagtaacaatatgttttacacaggagtttgagaccagcctgggcaacatggtgagaccccatctctacaaaaaaaattaaaaattagccagattgccgggtgcggtggctcacacctgtaatcccagcactttgggaggccgaggcgggcgtatcacgaggtcaggagatcgagaccatcctggctaacacggtgaaaccctgtctctactaaaaatacaaaaaaattagctgggcttggtggcaggcccctgtagtcccagctactcaggaggctgaggcaggagaatggcgggaacccgggaggcagagcttgcattgagccgagatcccgccactgcactccagcctgggcaacagagtgagactccgtcgcaaaaaaaaaaaaaaaattagccaggcatggaagctcacaccagtggtcccatctactcaggaggctgaggtggaaggatcacttgagccttggaggacgaggctgcactgagccatattcatgccacagcactccagcctgggtaacagagtgagaccctgtctcaaaacaaacaaacatttgtcgcatattttccaaaacagataaaaattatgaacctacagatgcaaaatgctcaacaaaccacaggcacaatatatatcaacaaatctacaccaagacacagcatcaaattgctgaaaaccaggtataataaaaaattctttaaagaaaccagagaaaatagacaccttaacaacagacaaccaaatgtaacattgattacatacttattatcagaaacaatgcaaacaggaagacaatggagtaacatccttaaagaactaaaagaacaaggatatcaacaaagaatcttatattgagcaaataatatctttccaaatgaatggaaaatactttatttagtcataataaatgtgtttgcaatcagcatattggctcattgagaaaggtacagccgggtgtggtggctcacgcctgtaacctgagcattttgataggctgaggtgggtggatcacctgaggtcaggatttcaagatcagcctggccaacatggtaaaaccccatctctactataaacacaaaaattagctaggtgtggtggcgcatacctgtagtcccagctacttaggaggctgaggcagaagaatcacttgaacccaggaggcggaggatgcagtgagccaagatcgtgtcactgcactccagcctcggcgacagagtgagattccgtctcaaaaaaataaaggtccagctgggtgcagtggctcatgcctgtaattgcgacactttgtgacgccgaggcgggagaattgcttgagtccagaagttcaagaccagcttgagcaacacggcaagactccatctctacaaaaaaattaaaatggcatggtagtatgtgcccgtccagatcactgaatccgtaaaaaaagaaaaacaggccaggtgcggtggctcatgcctgtaatcccagcagtttgggaggtcgaagcaggcagatcacctgaagtcaggagttcgagaccagcctgacaaacatggtaagatcccatctctactaaacatacaaaaattagctgggcgtggtggcgggcacctgtaatcccagctactcgggacgctgaggcaggggaatcacttgaacccgggaggtggagaaagcagtgagccacgagatcatgccattgtactccagcctgggtgagacaatgagattccatctcaaaaacaaaggaaaacaaaacaaaaaccaaacaaacaaaaaccaaactggctgtcttactactggggtggctgagtaagtcctctaaactactattcctatcaaatggtccttggacacacccttagagttttctcttcccaagatgatttttcatcttggtaatatggatagactgggaattttccaaatctttttgtttcagttccatcttaataattccatctccagtcaagtctttcctcacattagtatatgcagtcaagaggaaccaagctgcctttttcaacacttcttagaaatgttgtcaactcaatatccaatttcatcacttcctagttctactttccacaaaactagcacaggaccacgatacacaaagttctctgccactttataagaagaaatcaacttttctccattgtgtaataacattaacctcaattctctttttacatatattttagtttgtttcagaaacagggtctcactctctctccagcccaggctggagtgcagtagcatgacctagcttactgcagccttgaactcctgggctcaagtgatctggtgacctcagcctccctggtagctatgactacaggcatataccaccaagcctagctaaattttccttttttctttttttgtaaggatgaggtctcaccatgttgcccagactggtcttgaactccaggcctcggttgggcatggtggcacacacctgaagtcccagctacttgggaggcctgaggcaggaggatctgttgagcttaggagtcggaggtggcaatgagctataatcacgccactgcactccagcctgggcaacaaattgagatccccatttccaggaaggaagggaaaggagaggaggggaggggaggaagaagagaagagaagggaagggaaaggggaaggagaaggggaaggggaaaaggaagaggaaggggaagggggaaaatccaagcctcaagcgatcctcccatcttggccattcaaagtactgccataacaggcatgagcgaccatgcacattccactttcatttttgaggatccactctcataatctaacctaatccttatcatatctcaaagaaaccattgcctaatactgccacatcagggaagtggaaaaataaataaaattttctacaaacatttattccataacaagtgattagtagctttttatcattttctaaatactcttcatgttaatcccttatcagatatataatttggaaatggtttctcccattctatgggttacccatttactctgttaatattgccttttgatgccaaaggtccacaaaatccaaattattctttcccttgtgggtcatgcttttggtgccaaatctaggaaatcattgccaaattcactgtaatacagcttttgccatgtattttcatctaacagttatacagctaagatggacactcacatatttcgttcattttaacttctgtacatgttaggtatgggtacaacgtcatcctgttgcatgtggatgtgcattgcccaacagcatcattctacagaaacattaagctatcccccattgaatagtcacagcagacttttcagtaattgttagactttatgtaaattattagactttattagactttctgtgttatcttgttgcattgtctatttctgcgttattacgctagtaccaaacagtttttattagtatggatttgtaataagttttgaaatcaggaagtgtgagttcaccaactttgttctggctttttttttttttttttttgagacagagtctcgccctgttgcccaggctggagtgcagtggcatgatctcagctcactgcaacctccacctctcaggctcaagtgattcccctgcctcagcctcctgagtagctgggattacaggtacgcgccaccatgcccgactaatttttgtatttttagtagagatgcgatttcaccatgttggtcaggctagtctccaactcctgacctcatgatccacctgcctcagcctcccaaagcggtgggattacagatgtgagccaccacatctggccattgttctggcttttgaagactgttttgttcattcagagacccttgagatgtcatatataaaaaaataaaaaatgttaaaaaatggctcctaagaaggaatcaagtggtcaaacctatccctaaaaggctagcaggggacaaaaagtggtatctctcaataagaaaatacaaacctaagatgttttgaaaagtggtgtatcaccttggaaagttcgtcataaggtaagaacaaaccaagaaatcacacactaaagcagagagaagctgaagttcctcaaagtgttagagctgcccctacagtggcaaaaatgatccctctagttcatgataaactaaggataagcattaagtgtgtggctagaggacacgtcacagaaccacagccctactgatggtaacatcatacttgaaaaaacacttagccaggccaagcgcagtggctcactcctgtaatcccagcactttgggaggccaaggcgggtggatcacaaggtcaggagttcgagatcagcctgaccaacatggtgaaacccagtctctactcaaaagacagctgggtgtggtggcgcgcacatgtaatcccagctactcagaaggctgaggcaggagaatcacttgaacccgggaggtgggggttgcagtgagccaagatcacgccactgtactccagcctgggcgacagagcaacactccgtctcaaaaaaaagaaaaaaaaaaaagaaggaaagaaagaaaagaaaacaaaaaacacttagcctctgtaagcatcactgtgagggggctgaggagagcaagaggaaggagtttgaagccagtaagttctggctaggctaactatgcaacacagtgcagcccaagaacttgaagaccacaggagaattggcatcggctgatgccagggaaacaacagcattcctagaagagctcataaaacagaaaaaagacactaccttccagagtaaatcttctattgtcatgaatcaggcatgttctagaagatgcccaatggtaccttcatacatgagtgcaggtactggggttcaaggcctggaaagaccacctttttctggtgctgtcaggccatgcattagttcatgagaacaagcgaggcttcgtctactgagcaatcaccaggttctttaggacaaaagcaaaacttgctggcctgtgtcctggcaagaacataagaaggctttcttctagcaatgcttcactcctgatgtgatggaatacctcaaagagaagggactgccactcaaggtcttcctcagaattgacaacactccaggccatctctccaatctctgttttgcctaaaagaacatgcaagtgatatttctgcctcctaaaactacatcactgctgcgtcactagatcaaggcatcaagtgcattcaagtgacttacatccttgggtgaattcatggagtcttgatgctaaccttgaatgtaccacagtggttttattgaagagcttcacaattacaaatacaattgtgcttattgggaaggctacagatgccctaaagcccaggacagccaatacatgttacaagccatcatggggtaagggagtcaatgatttcaaggacttccctactattaatgcagttattaagaatatgtgaaatgttgcaaaaaaagttggtggggaacgctgtctgaaatgactgaggatgacgttaaggaacacaccgaaaagcaaagagaaacccttaccagctaggaacttcaaagtctgctgaaatccactacagatgatgatgagctagaaaacttagaagacacagagccattgatttggacacttgaaaagtttgccacagtttttcagtaggcaaaggtgaaaaagaggtacgatcctcaaagatcctataatggaacaaagctttcaatctacctgagaaacaacaacatgcctataagcaccacaagatttttttttttaatgaagcaaaggaaaagaagaactagcttcctatagctaagcatctgcaaataagacggaacattcaatggttttttcagtaggcaaaggtgaaaaagaggtacgatcctcaaagatcctacagtggaacaaagctttcaatccacctgagaaacaacatgcctataagcaccacaagattttttttttaatgaagcaaaggaaaagaagaactagcttcctataactaagcatctgcaaagaagatggaacattcaatggttacagatcttcagccctcaagccaaacagatcctaacattagtattacatagcctcctcaaatgagtccacatctataatcacaagttggttcttccaacatagatgatagtcctgatggcctgtcaagattcaagttaacctgatgtctcactacttacccacaatgccatacatctagtcatctcaacacatcaaaacactgggcaccacagaatcatcatcattgttataatcactatacttgggttatcaagagagaagacccagggttttggtaagtgttaacacattaaacagaagaaataggtgagagttgaaacaaagaaactttaatgttctggctgactacactatgttgataggctcacaattactgcatctatactgaaaatacatagactcttttccttatcatgattccctaaacaatacaatagaacaactatttgcatagcttttataatgcatgaggtattttaagtaatctagacataattgagactatacaagaggatgtgggtaagttacatacaaacatgtcattttataaaagggactggacatggctcacggagtgctggaaccaatacccagcaggtatcaagggatgactgtactggaaagaaactgaaactacttaaggctttaccaagtgcttacattcacagggtctatctccaatgtgtttcgtacaagtatctgaaatgaaataaaattaataaatgctttcccacattccatacatttagagagaatgctagtgagtctttttatgtctatgcaaggaactgagagaagcaaatgctttcccacattccttacattcatatgggttctctccagtgtgagtttttttccagtgagtctttttatgtctatgcaaggaactgagagaagcaaatgctttcccacattccttacattcatacgggttctctccagtatgagttttttcatgtccttgaagaaaacgggaatgagtgaaggctttaccacattgtggacattcataggatttctctctcatgtgaattctttcatgtcgtagaaagcaagtgagccaagagaatgctttcccacattccttacattcatacggcttctctccagagtgaattctttcatgtacctttaagttatcataatgaccgaaggctttcctacatgttttacactcataaggtttctctcctgtgtgagtccttttatgtcgagaaaggtatctgaaacgactgaatgctttcccacattccttacactcatatggcttctctccagtgtgagttgttttgtgattttgaaaggaacagaaatcaatacaggctttcccaagtttgcatttatagggtttctctccagtatgagttgtttcatgccttcgaagggaactggaaatacggtaggctttgccacattgtttacatttatagggtttctctgcagtgtgagtcctttcatgtctttgaaatacactgggataaacaaaggctttcccacataccttgcatttatgaggtccatctccagtgtgcattatcatatgacttcgaaagcttgagcgatgagataatgctttcccacactgcttgcattcatagggtttctctccagtgtgagttctttcatgactttgcagtgaactaggacaatcaaagcctttcccacatatcttacatttatgaggtccatttccagtgtgccttatcatgtgtctttgaaagcttcccagatgatgaaacgctttcccacattgctgacatgcatagggtttctctgcactgtgagtggtttcatgtctttgaagggaaccggaaacactgaaggctttcccacattgtttacatgtatagggtttctctccagtgtgagttctttcatgtattagacaagaactggaatcagggaaggctttagaacactgcttacatttatatggtttctccccagtatgtgttctttcatgtcttagataggaactgtaaaaaggaaaggctttagaacactgtttacattcatacggtttctccccagtatgtgttctttcatgtcttagataggaactgtaaaaagaaaaggctttagaacactgcttacattcatatggtttctctccagtgtgcgttctttcatgcatatgtaataaactgggccaaaaaaacgctttcccacacaacttacatttataaggtccatctccacgctgcactgccatgtgtctttgaaggtttcccaaagaactgaaggacttcccacattctttacaatcatatggtttctttccagtgtgaagcctctcatgtgtttgaaatgagttgtggtaactgaaggctttcccacgttgtttatgcgtatctggcttctctccacattcatgatactcatgtggtttgtgcccagcaccaactctgatgtaacaattaagggatgaatgacccatgactttttctcctctcatactgctttcacaaggacctactccaggaagagtgttcttggtcacaatactatcttgaatctggctagatgtttctccacattgagttccatctttactttcaacaaatctctctaacatacgacatctgtaaaaaatgggaaatatatcactaaaagtcggtctataaataattgtataggtattaataagtattggatgtacatttttaacactatcatgcgaagtgcaggcttcgtgtcctgcttgaatgtgaatggatggaatgctgtgcaaggtaactcgacccaggtgttctcaagacaatcacattcatatgtggattcataatattgttgtcatgggaactaatttatgaacactgaacagctatggaacatttaagtatatattttggagaaaattttctaagaataaataaatttaagctagccttgttcattttctttgcttctttttaaattttcatgtcattctcagaacggctccagggacatatctttctcttgtgagtgtaaattaccttagatttttcctgggatatctatattgatcttcaatgttctggtctttccatttcattactaaaaggtatacacagaaaaatcattacaaatttttacaaaattatagacaaacagtaacattttgatgtacactgcaatcgttcaaaatgcattcactgaagtacacctgactcttgaaaaacagaggtttgaactgcacaagtccatttgtatatacatatatatatgaatgttcttcagtctctgctacccaagacactaagaccagcccctcctcttactcagcctactcaatgtgaagacaatgaggatgaaaacctttccgaggatgcacttccacttaatgaacagtaaatatagtttctcttccttatgattatctttttaacactttctgtttctagcttactttactgtgagaatatacgatgtaataatacgacataaaatatatgtattaatcactgcttatgtgactgataatgctgcccatcaatagtaggctaagatgtggacaaaaagttatatgaggatgtacaactgctacaggagctggcacccctaaaccctgtttttttttttccagggccaaccatatcccctttccatattccaaatctttgaacagcatgaatgaccaagaaacaaatgtctccaattaaataagtggaaatgcgatgtcatccttacctacacaatccaggttcctgatggtttcctgcatcacatctttgtagagattcttctgacaaggacccagcaaagcccactcttctcgggtgaagttcacagccacatcctctaaagccactgaggcctgatccatcccacatgtacagaggaggaagggtgaaaatcacagtactgagaatctatactcacttcataaatttcacatgatgctgtggtttccaaccattttattcaatgacatggtaaacccactcttattctctgtctacactcactttctcctacacagtaactctgaagctacagttaaacgtttggtaaattaacagtgggatagaaacatgccacttgttggcgaactaagtgagtgaatcacatagcctggatcacccctaatgtcgatttccacagtgggtctgcagtccttggcacgataaagtcctactacttattgtgcaaaagggagttaccattagcagtgctgagactgcgtgtccttacaaatgctttttcacaaagttgggcttttcatggtgtctagacagtgtatttaggggagggccccaggagcataataacaggggtggagtgtgcctaaattgttcatgcaaaaaaaatatagtatttcgttaactcccatcttccttctgagagtctggaattttgttacatactcagcagacagagtgcactgatcagccactgctaggtttgaatggttgtcccctccaaaatgcacactgaatgttaatctccaaagtggcagaaaaaaaaaaaaaaagaaaaaaaaagtgggggctttaagaggtgatttagttctgagggtctggacctcatgaatagattaatccataatgggtgaatgaataaatgagctatctcatgtccttctgagaaaagaaagagatctgagctagacactcagctccctcaccatgtgatactctatgccacctagagactctgcagagtccccatcagcaagaaggtttctcatcagattcccagccttaaccctggacttcccggcctccagaaatgtaaaaattaaatactgtttcttataaattaccgaggttcagtaattctgttatgaattacaagaaacaggctaagacagctacaaagaaacactctgggcattgggtctataatgagctttctgggtagataatatttcacatgttttgttgcaacttgttatttgggggatttagcccatcctatgtgattatacttacagagaatatttggaagctggcaactagtttcctttagatcaaatgtagtgaagtatcacaagagactgataaaagatatttcaccatctcaatggaaaaattttaaacattttcttgagtaatgccaaaaggagaaggaaagaaggggaaagactgcatatattcttagaaagaactcaatgtcatctctcatgaatatttataatacttcctaaataactaaaacggaccttttagtagtcaacaaaaattacattaccaagtctaatagaactcacagtatctaaaaaatgctggaaactttctcaccaagaaagtgcagctttccaaaaacaaagaattttgaaactataatatttggctccccatactattaacacagagacaaatatatacatatacatatatatatatgaagaaaaatgaaaactggtagaaaagtctcgtagagtttttatttgtccttggcccaatctctcccccatcaatgacactcttgaacacagcagcccgagttcccagtatagaaccctgaacactaactctagagacagcagatcagaccttatttgcaaattattgccttgcattttccaatctgtataagcactatccaaaggtctgaaacaaggctgctttttttttttttttttttttgagacagagccttgctctgtcaccgagactggagtgcagacacatcacccagactggagtgcagacgcacaaccttggctcactacaacctctgactccagattcaagcaattctcctgcctcagcctcgcaagtagctgagagtacaggaatgctcaaacacatttggctaatttgtatttttactagagacggggtttcaccctgttggccaggctggtctcaaactcctgacctcaaatgatccgcctgccttagcctcccaaagtgctaggattacaggtgtgagccacagtgcccagccaaggccctctcttctactttatctacaatataacacgatcagggtccaatttggcaggaactgcatgaaaatgttgcaaaatacacaaaaagcctgtagacaactgcaagaacagactatgattaagacatacagtagaccaactaagtcacggagaaaaagagctgaagagaaaatgtcctccagatatcagggtactcaaaagcacccaggtatcctagggaattgagaaagccccatgcatgcacagtaaagaacacattttcacaaaagacaccggagaaaaacattcattttcgcttctggctgatctgtagctttaagtaagcagaacataaagcataagtagagtattaaacagcctggctaagtgttcaagggatgccccaggcacagagccatccacaaagactggaagaggtcaggcttttgtatgcttcatcttttttactagcttctagcattcaggaaatctctgccagaacactggatgaacacacactaaagaacagagatgtcagtttctacaacaaataaggaatacagtctgtgcaaacatactttgaaaatgttattaaacaaatgaacaattacagtcttcaacacacataaatagaaaacagtgaggaaagaagaagaatccaattttcagaagtaccccattataacattccgatatctacttttcaacacaaaattatgaagaatacagaaaaacatgaaaatatggttcatcaattggaaaaaatataattgagataagccatctctgagaaacctcagacaccactcactgaataaaaacgttaaaacaactatcttaaatatgttcaatgaagtaaaggcaatgatgaacaaataactaaaagaaaaccagaatatagatacagagataaaataatatctattaaaaagtagaaattaactgggcgtggtggctcacacctataatcccagcactttgggaggccaaggtgtgtggatcacctgaggccaggagtttgagaccagcctggccaatgtggtgaaaccctatctctactaaacatacaaaattagctgggcatggtggtgcacgcctgtaatcccagctacttgggaggctgaggcagaagaatcgcttgaacccaggatgtggaggttgcagtgagccgagatcgtgccactgcacttcagcctgggcaacaagagcgaacctctgtctcaaaaaaaaaggggtagaaatttagccatatagaatttatgcagctgcaaggtacaactaaaatgaagacatcttcacaagtgttcaacagatgtgagcagccaaaaaaaaaatcagttaaaatgatgataaatgaattgaaattaatctaatggggaaaaaaaggaatgaaattgagagaacatgtgattggtgtacttgtcttgccaataatgttaaaagaagttcatcagagagaagaaaaatgttacaggttagaaattcagatcatacacacacacacacacacacacacacacacacaaatatacacatatgcatatatatgaagagcattagaaaataattcaatgaaggcacaaaaattatttccttttcttattcctattggatatcataaaggtttgttcaaaaaataataacaatgtattgggtggttatagtttataatagggcaaatggatgacggtgatgttaaattgggcaggagggaggaatgctgaacactgggttatatgagcattaccctaaaagccagtacagtgttacttaaaactgaaggtccatttgttgtgaatggtttactccaaatgctagggaattcaataataaaatgttaagaaacaacagcctgtcacagtggctcagccctgtaatgccaacactttgagatgcaagacaggaggattgcttaagatcaagactttgagcccacactcagcaacacaatgagactgtctctacgaaacgtgtaaaaaattaaataaataaaaaaaaaattagccaggtgtggtggcctgcacctgtagtcccagctactcaggaaagcaagtagggaggatctcctgagcccaggagttggaggttatagttaactatgattgctccactgcactctagcctaggtgatagagcaagaacctgtctcaaaaaaaaaaaagaaacaaagaaacaaagaaacaagtagacttactatactattagaagaaaacacaatcatatagacacctcagttaaaataaaaggagacagaaaaagaaaggaagttgaaaaaaaccgacaagtataacaaatataaaacaattatatatgtacacatgaatccaagtatatcaataaccactttaaatgtgtattatatgaatataccaataaaagaagacaaggactgacagagtagaataaaaaaaacaagacctaccaatgtgtgcaagaaaactattttttttattctctcaagaaaactattttaagtagaaagacacaggtacattaaatataaaggtatgaaaaaatatactccattctagccctaatcaaaagccatatggggatgggcatgatgctcatgcctgtaatcccagcactttaggaggccaaagctggtggattgcccgaggtcaggagttcaagaccagcctggccaatatggtgaaaccccgtctctattaaaaatacaaaaaaaaaaaaaattagccaggcatggtagcacgcacccgtagtcccagctactcaggaggctgaggcaagagaatcgcttgaacgcaggaggcggaggttgcagtgagctgagatcgtgccactgcactccagcctggacaacagagatgctgtctcaaaaaaaaaaaaaaaaaattggtcttagctggaggtgggggcattggcctcaggcctctctgccatagtcaaagctactctcttacccttctatgctttacatggatatttaaaaacaaaatactcatgtttgatgaatccaggaaaatcactcaaattcagtgtctatgtctacgggtgggaaggaaattgtaaggcactgacattttatagctcaacaggaaaagcccaaatacctatcccttccagacaatgaatgtcatttaattactatttccatgatagtaagtgatatagtaaaaaataattatattttacttctttagctgttggaaagtcctgtcccacagaatttagcattcatctgtcagatataacaggaacagaacagatttctccattgtcccaaaatctccacccttttaaaaaggagaagaactgaacttttgttaaatctttttaattcaatgtacctattacactttcttgtaaaaatgtattccttttttgcagccataatggaagagggtttttcccttggtagtagttatactactaagtcctgaaattccatctgaaatcatccgaaaaacaaacacacctgagaaacgtactacacaagctctggggcaaaaaaaataaataaaggcttttaaaaaatggaatagaagattacatataccatttatattctgaagtccaactctttctagtattacttataaaatttattttctgaagtccgactctttccaactttgggtatactttgtcttcaaagtataaaataacaatctctaatcataggatgtatttcacggttaatcaaaaatttaggctgaaaagagtaaacatatcttttcaagctaacaaactcaggaatcagcagtgctgactggaacacagaaaagtctaatgcaacaatcagtgcaggtcatcctatcacctgggacatcccttaaccctattctgttcgccaccctcctaggagacactcaccaccctcctaggagacactgccttgtgtgcttttcaggatcttgcactacctcaaagggcaggttctccagtccttagatataactttctaccttttaagtctgagagagtccagaaggcaaaaatcatttccgttttttttcctatggaatatgaccatgaaattggctgttcagtcatgtgtctccaaggaatggaaactagggttgggaagaaaaggtgagtgtcccaggagttagctttttacaggaattatataccagaagattcctcccatcccagtggatccagttgctccccagggggccacaccttccatctcaggctgtcccctgggaggagtgacccaggggatgatattcactagaccctccaagagacttggcagctgtggacatccattttttttgagacagggtcggcctctgttgcctaggctgggatgcagaggcacgatcatagctcactgcaacttcaaactcctgggctccagccatcatcccacctcagcctcaggagtagctgcgactacaggtgccagctaccaagcccagctaattttattattatcatttacactagagacaaagtcttgccatgttgcccaggctggtctggaactactgggatcaagcaatacctctgccttagcctcccaaggtgctggaattacaggaatgacccaccgtgttcaggaacccaaaacaattctttcaagaaaaagccatacattgctagctgaaaacaagatgacaaactagtgaaatatcgcctggggccaaacagttcatactgttgctgtgaattaaggacagaaggttagcctggggaagtctctggaaaccaagagatttgctgccagccctaggaagagtcaggatgagagaacacagtggtggatttgagaccctgctgcccacgtctttggaagactcagaggggaaacggtcgcccttggaaaggaagaaaggactgaggaccacggaaaccacagctcctcccacacacaaaccccacacacgagtctggattccacctggtgactcgtcgtcaccgtgcagcctcctcaccgggttcacaggaactgcgagccaggctggaggcgagattgcagttagatattaaacaggtgccctcagccccgctgcctcaaggggccgcctccctgagagtcaggtcacagcagacgctgaccgccggcttccccattgtgcctggggataagatctccgagtgctgctcaagagtcgccggagttctcagatcctgaatcccagcagaaaggctggcgccaaccaggttgaagaccccacgagggagccctctcagcagaatgcggtttcttcacctcctgtcccaggattcacccctcacttccccaccaaccaaggacgctacacccagccgcccccgtccagaccccaaatccctcagggaggcggatctggggtgtcctcccctctcctcctgttaaaccgtttctgctgcagccctcggcgtctcggtgcagtgagtcgggccgcgaacctgtgttggttacagccgcacaatctggggagacccggggctgcgggctcggagctgcccagagagggcgccggggccgcagtcgccgcgcaggaacgggacaggacgcccggggtcccggctgcatgcccagccccaccctgcggccgagggccgacctacgccagggggacccgggtccgtagatcccgaagtcgcccttggggaggcccgggtccagccacagccgattacggccggttccacctaacccctcccccgcctcgggacgccggcccagcacacgcaccatttcccgacttccgcggtgtcccaggtcctaccgacagctcccgctgccaatgcgtgttccagccagacaaaggctgcctcagaacttccaggtcgtctctcagctacagaacccagagccgagcgcaggtgggtggagcagacgccgcgggctttttcaaccacacacacttctctgggcagtgcctgattgacagttcccacgaacccgccccacgcccctgattggatagggcgtcaggtcccgccccctgagggctgattgacagaagaagcgatcttgcacagctgagtggagccggatgagcaagttcctgacacagcccttggcagggggggcttcctccctgctctttgatctgaatcctcccgggttatatttgcacttaagcggaatttcctgcccgtactcaataggacctcctgcttcttcctcctggacacggactgacaaactaattatatctttttttttttttttcctcgagagggagtcttgctctgtcgcccaggctagagtgcaatggtgcgaggctcactgcaaccttcgcctcctgggtgggttcaagcaattctcctgcctcagcctcccgagtagctaggattacaggcacgcgccaccacccggctaatttttgtatttttcagtagaggctgggtttcaccatgttggccaggctggtctcaaactcgtgacctcgtgatccgcctaccttggcctcccaaagttctgggattagaggcgtgagcaactgcgcctggctccaattatgctctttttcaatgaaatttttcaagatttttcaatgtacaattaaattattttttactatagtcactctgttgtgctagcaaatactaggtcttattcattctttgtaactattttttatacctattaaccatccccacttcccccataactactcctcgctactacttttcgcagcctctggtaaccatccttctacacatttttggttgtttgagatggggtcttgctctgttacctaggctggagtgcagtggggccatcatggctcactgcaacctctacctcctaagctcaagcaatcctcccacctcagcctctcaagtagcttcagattgttcactgttggcatataaaaatgttattgatttttgtgtgttgatattgtatactgcaactttactgaatttatttctcagttctaatacttttttggtggagtctttaggtatttccagatataagatcatattatatgcaaacaaggataatttgacttcttccttcccaatatggatgccctttatttctttttttttcttttttttttttttgtcttattgctctagctgggacttcaagtactgtgttgaacaacagtggtaaaagtgggcattcttattgtgttccagatcttacaggaagggctttcagtttttccccattcattatcatgctagctgtgggtctgccatatatagcttttattatgttaaggtatgctccttctttacccacttttttttagggtttttatcatgaagggatgttaaatattatcaaaagctttttcagtgcacattgaaatgattatatggtgtttgccctttattctgttgaaatgatacatcacattgattgatttgcatatattgaaccatccttgcatcccagggataaagcccacttggtcatgatgaatgatctttttggtgtattgttaaattcagtttgctagtattgagttgaggatttttgcatcaatattcatcagtgacactggcctatagttttctttttctgacatgtctttgtctggttttggtgtcaaagtaatattggctttgtaaaataaatttggaagtattgccttctcctctgttttttggaatagtttgagtaagattggtattagttcttttttaaatgttggtagaattcagcagtggagccactgggttctggggttttctttgctaggagactttttattatggctttgatctcattatttgttattggtctgttcaggttttttatttcttcatggttcaatgttgctatgttctatctgcctaggaatttatcagtttcttctaggttttccagtttattggcatatagttgttcttagttgcattaatgatcctttgaatttctgcagtatcaactgtaatgtctcctttttcacctctaattgtatttatttgggcctggttttttcttagtctacctcaaggtttgtcaattttgtttgtcttttcaaaaaaccaactttttgtttcattgttcttttctattgtttcttcatttcaaattcatttatttctactgatttttattatttcttttcttctactgattttgggtttggtttgctcttgcttttctaattctttaagatgcattcttaggttgtttatttgaaggttttcttcttcttctttttttttttttgagatgagtttcacttcactcttgcagcctaggctggagtgcaatggcgcaatctcagctcactgccacctctgccttctgggttcaagcagttctcctgcctcagcctcccaagtagctgggattacaggcaccgaccaccatgtcattttttgtatttttagtagatacagggtttcaccatgttggccaggctggtctcgaactcctaacctcaggtgatccactccctttggcctcctaaagtgctgggattacagatgggagccactgcacccagcctgaaggtcttcttcttttttgatgtaggtgcttatatctataaacttccctcttagtactgcttttgctgtattccataggttttggtatgttgcattttcattatcatttgtttgaagaaacttttcaattttcttcttaatttcttcattgacccactcgtcattcaggagcgtattgtttaatttccatatgtttgtatggtttccagaattcctcttgtcattggtttctagtttattccacttattctgtgacacaatttatattatttcaatttttcggagcgttttaagacatgttttttgacctaacatatggtctatccttgagaatgattcctgtgctcaggaaaagtatgtgtattctgtagctgttggataaaatgtgctgtaaatatctattaggtccatttgatctatagtgtagattaaatcccatttaatctttcttttgtccaatttttcagtatatattgaaataatctttgttgatttactgtctggaagatctgtccagttctgaatatggggtgttaaaatctccagctattagtgtattggtgtctatctctctctctctctttttttttttttttttgagacagagtttcactcttgttgcctaggctggagtgtagtggtgcaatcttggcttactgcagcctccacctccaaggttcaagcaattctcctgcctcagtctcccaagtagctaggattacaggtgcccaccaccacacctggctaattttttgtatttttagtagagacggggttttgccatgttggccaggctggtcttgaactcctggcctcaggtgatccacctgccttggcctcgcaaagtgctgggattacaggcataagccaccatgcccggccctctctctttttacctaataatatatgttttctatatctgagtgctccaatgttgggtgcatatatgttcacaattgttacatcgtcttgctgaattgacctctttataattgcatagtgaccttctttgacttttcttacagtttttgtctcgaaatatattttgtctaagtattgctactcctgctctttattggtttccactggcatggaatatgtttttccattcctttatttccagtctatgggtttctttataggtgaagtgtgtttcttgtgggcaacagatcattaggtcttgtttttttaatccatttagccattctatgatttttgattggatagtttaattcatttacattcagtgttattattagtaagtgagaacttactcctgccattttgttatttgttttctggttgttttttcatcttctctcccttctttccttccatcctgtcttctttttagtgaaggtgactttctcttgtggtatgatttaacttcttactttttattttttgtgtatctgttgtacattttttgacttgaggttgccatgaggtttgcaaatactatcttataacccataattttaagctgatgacaacttaatgctgttgtataaacaaagaaacaaacaaaaagaaatctaatgaaaactctatgccttaacatcatacccgcttcttaacttttctttgtttctatttatatattgcttgtactgtctgtgttttgaaaagttgttgtagttattattttggatttgttcatcatttattctttctacttaagaataatttacggccaggcgcggtggctcaagcctgtaatcccagcactttgggaggccaaggcgggcagatcacaaggtcaggagatcgagaccatcctggctaacacggtgaaaccctgtctgtactaaaaatacaaaacattagccgggcatggtggcaggtgcctgtagtcccagctacttgggaggctgaggcaggagaatggcgtgaacccaggaggtggaacttgcagtgagccgagatcgcgccactgcactccagcctgggtgacagagcgagactctgtctcaggaaaaaaaaaaaaaaaagaataatttacacaccacagttacagtgttacaatattcttttttttttttttgagatggagtctctgtcgcccaggctggagtgcagtggtgcgatctcggctcactgcaagctctgcctcccaggttcacgccattctcctacatcagcctcccgagtaactgggaccacaggtgcccgccaccacgcccggctaattttttgtatttttagtagagatggggtttcaccgtgttagccaggatggtctcgacctcctgacctcgtgatccgcccacctcagcctcccaaagcgctgggattacaggcgtgagccaccgcgcccaggcttttttttttttttgagatggagtctcactctgttgcctgggctggaatgcagtggtatgatctcagctcactgcaacctccacctcccaggttcatgtgatcctcctgcctcagccccgctagtagctaggattacaggcacacaccaccatgcctggctaatttttgtatttttagtagagaccgggtttcaccatgttggccaggctggtctcaaactcctgacctcaggtgatccacctacctcagcctccgaaagtgctaggattacaggcgtcagccaccgagcccggcatacaatattatttttgtgtgtgtgtacttactaataccagtgagttttgtatcttcagatgattccttattgtacatccttttgtgattgatgtagttcctttagtatttcttgtagaataggactggtgttgatgaaatccctcaacttttgtttgtctggtaaagtctttatttctccttcatgtctgaaggatattttcactgaatatgctattcaaggataaaagtttttttccttcagcactttaaatatgtcatgctgctccctcctggtttgtaaggtttctattgaaaagtcttctgccagttgtattggagctccattgtttgttatttgtttcttttctcttgctgcttttagagtcccttctttatccttgacctttgagggtttgattactaaatgccttgaggtagtcttctttgggttaaatctgcttggtgttctataaccttcttgtggttggatattgatatctttctttaggtttgggaagttctctgttattatccctttgaatgaactttatactcctatctctttctctaccacctctttaaagccaatgactcttagatttgcccttttgaggctatgttctagatcctgtaggcatgcttcaatgttttttttttttttttttttttttttgagacggagtctcgctgtcgcccaggctggagtgtagtggcgcaatctcggctcactgcaggctccgccccctggggttcacgccattctcctgcctcagcctcccgagtagctgggactacaggcgcccgccacctcgcccggctaatttttttttgtatttttagtagagacggggtttcaccgtgttagccaggatggtctcgatctcctgacctcgtgatccgcccgcctcggcctcccaaagtgctggggcttcaatgttttttattctgttttcttttgcctcctctgactattttcaagtagtctgtcttcaagctaattctttctttcttttttttttttttttgaggcggagtcttgctctgtcgcccaggctggagtgcaatggtgctatctcggctcactgcaagctccgccccccaggttcatgccattctcctgcctcaccctcccgagtagctgggactacaggcacccaccaccacacctggctaattttttgtatttttagtagagacggggtttcaccgtgttagccaggatggtctcaatgtcctgatctcgtgatccgcccaccttggcctcccaaagtgctgggattacaggtgtgagccactgagcctggcccaagctaattatttcttctgcttgatcaattctgctattaagagactgatgcattcttcagtatgtcaactgcattttgaactccaggatttctgcttgattcttcttcttctttttttttttttttttttttttgtgagatgaagtctcactctgtcacccaggctggagtgcagtggcgtgatctcagctcaccacaaccctgcctcccaggttcaagcaattctcatgcctcagcctcccgagtagctgggattacagacatgtgccaccatgcctgactaatttttatattttagtagagatggggtttcaccatgttgtccaggctggtctggaactcctgacctcaggtgatccacccaccttggcctcccaaagtgctgggattaaaggcatgagtgactgtgcctggccttgattcttttaaattatttcaatctcttcattacatttatctgatggaattctgaattccttctctctgttatcttaaatttctttgagtttcctaaaacagctactttgcattctctgcctgaaaggtcacaaatctccatttctccaggattcgtctctggtgccttatttagttcatttggtgaggtcacattttcctggatggttctgatgcttgtggacatttatccctgtctgagcattgaagagttaggtatttattgtagtcttctcaatctgggcttgtttgtactcatccttgttgggaaagttttttagatatttgaaaggacttaggtcttgtgatctaaggcatctctacattaaggggcatcccaagcccagtaacactgtggttcttgcagactcttagaggtaccaccttgattatcttggataagatccagaagaattctctggattaccaggcagagatgcttgttctgttctctcttttcttttctttctttctttctttcttttttttttttagatggagtttcactcttgttgcccaggctggagtgccatggcacaatctcagctcaccgcaatctccatctcttgagttcaagcgattctcctgcctcagcctcctgagtagctgggattataggcatgcaccaccacacccggataattttgtatttttagtagagatggggtttctccatgttggtcaggttggtctcgaactcctgatctcaggtgatccatctgcctcggcctcccaaagtgctgggattacaggcatgagtcactgcgcctggcctggtctcttctctttactccaaacagcatgtctctctcttgctctgttctgagccacctggagctggggctggggtgacacaagcaccctggtggccaccatcactgagattatgccgggtcagacctgaagtgagcacagcagtgggtcttacccaaggcctgctgtaaccactacctggctaccacctgtgtttgctcaaggcgctgaggctctacaaccagtgggtggcaataccagccaggcttgtttccttcccttcagggtggcaggttcccccaggccctgtgtgggtcaagaggtgctatgcaggagccagtgactggagtaaaaaaactcagaagtctacctggtgttctaattgtactgtggctgagctggcactcaaatcatgagatgcagtcctttccactcttccctcccctttccacaggcagagaagcctcaccccatggccaccaccaccaaaggcccatggggagtactgccaggctactgtcaatgttctcttagagaccaaaggctcttgagtcagcttgtggtgaagctgcctggcctgggattcacccttcagtgcagtgggctcccctctggctcagggaaggtccagaaatgccatccaagatccaaggcctggaatcagggatcccaacaacccacttggtgcctaccccactgtggacaagctggtaccgaacatgcaaaagtctcttttgcttttccctcaacttttttcaagcagaaggagtctctccctatagccaccacagctgagaatgttctgagtttcactcaaggcctatggtgtactatcagggtattgctgctggttattcagggcccaaggactcttcagtcagcaggtgatgggtccttccagaactgagtcctttccttcaaggcagtgggtttccttctggcccaggatgtgtttagaaatgtcatccaggagctagggcctgcaaaggggacctaatgactatgactggtggcctatcctactgtggctgagctggtatacaaagtgcaagataaagttctctttactcttccctctcctcacctcaagcagaaggaaggggtctcttttggagccgtgagctgtgctgcctgggattgggagaggggtggcacaagcactcccttagctgccctaactgttgtcttactaggttacatgcccaccaagtccactggctctgagcccagctcagtactaggaattgcctcagagttgcagtccttgtggcctagacagcccttcaagtttacttaggattccagagcattttagcccacagtcgtgaggctcactggaactcaagttccagccactgggatgggtaattcccccctgactagagctgactatttatttatttatttatttacttattttgagatggagtttcactcttgttgcccaggctggagtgcaatggcacaatctcggctcaccgtgacctccacttcttgggttcaagctattctcctgcctcagcctcccaggtagcttggattacaggcatacaccaccacacccagctaattttgtatttttagtagagacgaggtttctccttgttcgtccggctggtctcgaactcctgacctcaggttatccgcctgccttggcctcccaaagtgctgggattacaggtgtgagccaccgcacccggccaaaactcaagttttttaagagagtgggcaggaagatccagctcaccttactagccactagagctgatttaaatgctccctctgtgggtgggcatcagctgaattcagcctggttttgctttctacttgttggtagaagagctgaggcaggactggcttatctgtcataatataaaagagtcttggaagatgtctggggtccagggtctaaaacccctcgtggcctttggaacaccaaactctgtgccaaggggtggaaggctgccctgccgcaccacaaatctaagcccagggcataaaacccctcatggcttggatggaatccagggcttagggcataaaacccctcgtagcctctggaatgtgcacagacttgttggttgctctcccaggttcgtaaacatgttctctattatctccaagcagcagagcatattatatatgcatcaaagaaaatgctaaaccatcacagatacgcttgatgcaccactacctttctaacctcacaccctcacctgtttacccctacgtcctcaagacctgcttctttgtttgatcaccaataaataatgtgggctcccagagctcagggccttcgcagcatccataccagcgttggccccctggacccaccttatgcactcttaacttgtcttttctcattcctttgactacgctggagtttgtagcccccacggcctggtgttgggtctgatcaccccaacatttctggcacccaacgtggggctacgaacactccggtgaaggaacactagagtgtgcggaagcggaggacacattgtcagaggacacccaaggacgactgaaagaagcttggtgggtaagctgagcactcagaagaaccaggttaacaatggaacagaatgaaagtaaatattctgcttatttaaatttcttaaggcatttattatggagagggggagtgaaagttaatactcagaacttattaacactctttgatacagtagagcagttttgcccatggttcccagaacaaaggacaatggagctagatgaatggggaagaattggcagaaattttaaaaacgcatataaagaaggagccaaaattccagtttctgtttggtcagtgtgggagttgataaaggcagttcttgagccatttcaaacagatgacaaggcagattcagatgaggaagaggtagatgagtgtaaaaaattaacttcagattctgaatatgaggaacagcaaccggaagaaattaaagaaaagaaatggaaactgaaaaaggtatattttactagcccttcggttccacctgctgaattaagtgaatggccacctcctccctctccccctaatgggtgagaagatgaattagctgtaaaacttaccgctccggtagctgcaacattaaaacctggagcaattggtgatgcgatataaaattttattcagaaggctagaactgaaggagacctagaagcatggcaatttcccattactataatccagagaggaggacagaatatagctagttgggccacctttccttttaagttgttaaaggaattcaagcaagccattagtcaatataggccaaattctccttttgtacaaactttactaaaaaatgtggctcttgataatagattaataccatatgactgggatactttaacaaaatctgttctcactccatctcagtgtttgcagtttaaaacttggtgggctgataaagctcaaactcaggcaagagaaaacacacaagcacagctgcctgtgcctgtttcctttgaacagttaatggggttgggccctaattggggccgattagacaatcaagcagtaatgaaaaatgttgccattgttcagttatgcactgtgtgcttacaggcatggaaaaaaaatgttacagggtaaaaatatccttctttcattagacctatgagagggaagactcatttggctgaatatattaaggcttgtgatggcactggggaaaattttagtccagctatggcttgactaaaggtgggaaaaaatatgccccatttctcaggctcttgttttaattgtgggcaatttggacacataaaagaggaatgtagaaaaggaaatcagaaggcaaaaactattgccatcaatcaacagaaaagtccaggtgtatgcccccaatgtaagaagggcaatcactgggcaaatcagtgtcattctaaatctagcaaagatgggcaacctctttcgggaaacgggaataggggcccaccttgggcccctcaacaaactgaggcatatccggcacagtcagtgcccttacaaacatacaacaattgtcccccgccacagcaggcagcgctgctgtagatctctgcagcacaattcccgtttccctacttcctggggagccaccaaagaacgtcccatgagagttaggagccctttaccctcaggaacagttggtctattgcttggaaggtctaatttaaatttaagaggtgtcgctgtacataaataattgattctaattataccggagagattcagttagttattagttcctcaattccatggtctgctttcccaggagaaagaattgctcagttgttactgttaccttatgcaaaactgggaagaggcacagtagaaaaaaaaaaaataggaggctttggtggtacgaatccagcaggaaaagctgtatattgggttaatcaagtgtctgataagagacctatttgtacagtaaccattcaaggaaaggactttgaagggttagtagatactggagctgatgtttctattattggtttaaatcaatggccccggcattggcctaagcagaaggcatccattggtattgttggagtaggggctgcctcagaattttttaaagttctttaattttgccatgccaagggctggatggccaagaagggacaattcaacctattgttacacctattcctgtcaatctatggggtagagacttattacaacaatggagtgctaaaatatctattcctatggatcagtataataataacagtaaacaaatgatgagaaaaatgggatatctcccagggaagggactaggaaaaaaaaaataaaaatggccaaccagaacctttagaactaaaaaggcaaacagatcgaactggatcagggtatcatttttaggagctgcaattgctgagcctccggctcccattccgcttgtttggttaactgccaaaccggtttgggtggagcaatggccgctgaaacaggaaaaaccggaggctttaaaagaattagtgcaggatcaattacaaaagggacacatagagcctactttctccccttggaattctcctgtgtttgttattaagaaaaaatcagggaaatggagaatgttaacagatttgagggctgttaatgctataattcagcccatgggctcactgaaccagggctgccctctccaacaatgatcccaaaatactgacctctcatagtaatagatttaaaaaattgcttttctaccattcctttagctactcgagattatgaaaaaattgcttttactgttcccactataaataacaaagaaccagcggacagataccattgaaaagtactgccacaaggcatgttaaattgcccgactatttgtcaaacttatgttggaaaagctattaagctagttagagaacaattcaaaaaatgttatattatccactacgtgggtgatattttatgtgcagctgaaactagggaggattaatgctatgctacaaacagttagaaaaggctgtaactgcagcagggttaatcatagcccccaataaaatccaaacttctactccctttcagtatttacgaatgaaagtaaaacaaagtactattaaacctcaaaaagttcaaattagaagagataatttatagactaaataattttaaaaatcattaggagacattaattggatttgtcccactttaggcattcctacttatgctatgtctcacctcttttctaccttacgaggtgattctaacttaaacagtaaatgctccctgtccaaagaggccttagaggaacttcaattaattgaagaaaaaatttcttgttttattccattagtgaggacatctaggatgatgatgaatagcagtggtgagaggaggcatccttacctcgttcctgatctcagtgggaaagcatctagatatcaaaattaagtatgatcttagcttggcttctttttagaggttctttatcaagtgggagaaatttgcttctatctgctattaggtttatggacctgagcatgccacctaatcattgcttttcccttttctttctgtaaaaaatccctcagaattcatataaagttgcgagtttcaggttggttggctctgactgatcacctgtattatggaccatctgtgtgattatggggaaaagttcaggacaccagcaacctacattggataggaccacctctgactccagggattgccactcaatctttctgagattagcacccacatccaacaaggtaattttgcctaagaccctggtgggaaccaacggccttgtgatctcaagattatccctttgacatgctggtaagcagcagtactacagaaaacaatgtagccccctggctacttgttttgctttggaagaacagttgagttacatcctctcatgctttggaaaggattgataccaaatgtaccttcttttctttgctcatcagtgcctgaccatggggtatcatggatgtgcatgtttcaatagcctcccactcaccccattggtgagagaggaattagggccctagggctatttaggtaggctaacacatgatatccatcactggacaaatgcaactgacaacagtttattagtcatatatattcacagcccagatgaggagggtaccataagtcatgcagatccacaaagaaaatgtatttgggagcagagggcccaaacatggctgtgggaaacaggctttgtagtatcaaaagggtgaggtaccccttggttcccctgggaggatgtgattcacttctttgaataatgtgtgggttagcaaggatctgaaaccccttatacaagagacaaagactatataactatgctataatagtataaaactgtattatgcattatagtataatagtaattatatattttagttatacataacatataccagttatgttttatatatacaattatatatcattatgtaatatattacatattatatacacaaatatatctataaatgtacatgtaaacacactataggctatactagataatgctatactacatagtagaaaatggtccagaaatatctcttttgaatatagctgcagaggcccgacaaaataccagcaaattgaatccagcaatatataaaaagacctatacaacatgaccaagttggattgagctcagaaaagcaatgttggtttcgcatataaatatatattaatataccatatttacagaataagggatctattatcataggatcatcccaaaaggcacagaaaatgattttttttttttttagacagggtcttgctctgtcacctaggctggagtacagtggtgtaatcatagctcactgcagccttgaactcctgggctcaagtgatcctcccacctcagccttctgagtagctagggctacaggcatgcaccacaacactcagcttatgtttaaatttttctgtaaagacgaggtcttgctatattgcccaggctgatctcaaactcctggcctcaagtaatcctcctgcctcagcctcccaaagtgttggaattataggcgtggctcacacctggccaggtaatgaatatgacaaaggccaataccattttacaatgaaaatactcaatagagtacaaataggatggaactttctcaatgtgctataaggcagctatgagaaacagctaacatcatacttgatggtgaaagattgaacgctttttatcttagatcaagaacaagagtgtctgcttttatcacttctattcaacatgttaaagaaggtgctaccagggcaattaggtaagaaaatgaaatgaaagcactccagatattaaagggcatacatacatagcccctcagacagacatacaacatcgcacagacttgatcactgcacatacaggtggacaaacccagacacagacacacaaacttccaaacttacaaaccctcagtgattaaagccctagatacaccaacagatgcccccagagacatcaacagcccaggccctctgcaatgttccccagcttcctttccctctttaggactaaccaccatctgatacatcatgtgattttgcttgtatctcatttcttgcctcctagaatgtcagcttcaagggaacactattagctaaggtttgttcactatgaaacctacaaaggacatgttacatagaagagtttaatatgtattgaattattggggctctctgtcacacacatacacacacacccacacacctcgttatagggccacatccatttgatcttaagagtgaattgttaggccgggtgcagtggctcatgcctgtattcccagcactttgggaggccgagatgggcggatcatgaggtcaggagatcaagaccatcctggctaacacagtgaaaccccatctctactaaaaatacaaaaaaattagccgggcgtgatggtgggtgcctgtagtcccagctactcaggaggctgaggcaggagaacggagtgaacctgaggcagagcttgtagcgagctgaggtcacgccactgcactccagcctgggtgacagaacgagactccgtctcaaaaaaaaaaaaaaaaaaaaagagtgaattgttctcacttccatcccatgtggcagaaaaagtgtgtaagtattgcaaaacaaattttaaaataagttttaaaatatgaatattttaaaaggatataattatacaaaccttgcaatgttcttctaagtttaaagtttttggctgggcatggtggctcacgcctataatcccagtattttgggaggctgaagcaggtggatcacttgagctcaggagtttgagaccagtctgggcaacatggcaaaaccccatctctacgaaaaaagaaaaaagtcagctgtggtggtgtgcacctgtggtcccagttacttgggaggctgaggtgggaggatcacttgagcccaggaggtggaggttgcagttgagccaagattgcactactgcactccagcctgggtgacagagcaagacagtctcaaaaaaaaaaaaatttttttttttggcagtgcccagtacaggtggtggcacacattaggacttcaaaatccagagattccatgattctgagttacgtgagtttgggtaggatcctgtgccctgtacttaactttcttcatctgtaagatgggagaactgattggttgagcaatcaaatgagatacttataattatgaaatcacagtgctaagtactaacataagttaccactgaaaaaaaatggacaaagattttatttcctttgctcaaatttagtaagacacaaatattttactttccccccactcttcccaaacatgtgaataccaaattgggatctggggactttctggaagcattgaaacaaaaagattcaaactactactcttgtaagaaggcattaaatttttccttatatgatgacaccaaatattcttcctttccattaaattaggctattatgcaaaatgattccctgtctgcagctcacctccattattccttgaaaattaccctctaaacatccatagattttttgggtggtacatattgggtcattcagtctgcacaacagcaaaatgatcatgtcaaatatccaaggcaacttaagaatctttaaaatgacattaaacagaaatgtaaacatcatcaacacctgtggcccaaatcaataggaaatctcaaatcctaaatactcatgtccaaattcatgatcatgctttacatgtctcaaaaattttatccattataaaaataaagatgaaccatatctacacctttgtttatggggaatcattactgttcatcccagggatgtaggactgtattgttccccagcatacatcaaacctgagcagttcctcagtgttttaataagatatgttagataggccaggctcagtggctcatgcctgtaatcccagcactctggaaggctgaggcaggtggatcacgaggtcaagagattgagaccatcctggccaacatggtgaaaccccgtctctactaaaaatacaaaaattagctgggcgtggtggcacacacatgtagcctactcaggaggctgaggcagcagaatcacttgaacctgggaggagggggttgcagtgagccaaaatcacgccactgcactccagcctggcaacagagtgagactccgtctaaacaaaaaaaaaggccaggcgcggtggttcacgcctgtaatcccagcactttgggaggccgaggcgggtggatcatgaggtcagaagatcaagaccatcctggccaacatggtgaaacctcgtctctactaaaaatacaaaaaaaaaaaaattagctgggcgtgatggtgggcgcctgtaatcccagctactccggaggctgaggcaggagaatggcttgaacccaggaggcggaggttgcagtgagccaagatcacactccagcctgatgacagagaaagaccctgtctcaaaaaaaaaaaaaaaagatatgttagataatggaaataaatgatcaatgacaatattggaggtccctaccctccaaagctaaggtatccaacacaaccatagcttccctattaatctcacaggttggttgttatttcatttccttcaaagatcttaattgctttctaaaaaccaaatcctcaccttttattaaccatctctcttttcccaaatctataagcaacaggaaggcaagaacttgtttcatgtttctatatccatagcctacaatgtcttgattatttgtgctgaattgtgtatgctttgatactacagtgccaggcctatgagaaaggttaaaaaaatcagcatcaagagcaagatggcttgatttgaacagtgattctgtctttgcaccttgctaggtttgtggtctctgaaaacttatctacacttacaggactctgctagtgcacaaaagagaaaaaaaagtatatagtttgctaaagactcagtgaacttacatattttgactgagatattttgtggaaaacattgtccaatacaccataagaaatatttccatgtttagataataagaaaggttaagagcagttccacaggactaggatctgacctcacactcagataaggccaagtcttatcctgttgaagagaaaaatgtcacatttccttcatcagacaaagctactcagcaatcatgatggatcaagacaaaaacaataaccatgtctctaaaaatggtaaaagagaacagagttgaagccattaaaatgaccaaaattgccctctactcactaatccaagtgagtggtttcttaggaattaggtttagctccacttcattcttcctgcctctagataagaattatgattaccagtgacacaattaagttcacctcacagcaggcaacacacacaggagtgtctcagtttggtgattagcaatcaagtcacccaacaaatccaaatccaaaaagaagttgttttgagaaggagtcttgctctgtcgcccaggctggagcacagtggcgtgatctcggctcactgcaacctccacctcctggggttcaagcaattctcctgcctcagcctcttgagtagctgggattacaggtgcacgccaccatgcccggctattttttatatattttttagtagagatggggtttcaccatgttggccaggctggtctcgaactcctgaccttgtgatctgcccaccttggcctcccaaagtactgggattacaggcatgagccactgcgcccagccgagcaccctcttactgatactccccagagtcatttatggtttatgatcattcttattcctacaattcttaacactcttctcttgactacaggtgtgatcctggtgatctttgaaaaaaaggcactgaaacaaccatgatttaagtttttggtattatgaatgcatgagaaattttctgggaaaaaatcataactatattaagaataaaaaataaaaaattcctaaggaaaatacttgatcttgtatgcacataatattgactcagaatatatgaggattaactcaataaacttaaaaacttaatctgaaaatcactggattaagaaaatgtggcacatatacaccatggaatactatgcggccataaaaaaggatgagttcatgtcctttgtagggacatggatgaagctggaaaccaccattctcagcaaagtatcacaaggacaaaaaaccaaacaccacatgttctcactcacaggtgggaattgaacaatgagaacacttggacacaggaaggggaacatcacacacgggcctgttatggggtggggggaggggggagggatagcattaggagatatacctaatgtaaaagacgagttaatgggtccagcacaccaacatggcacgtgtatacctatgtaataaacctgcacgttgtgcacatgtaccctagaaattaaagtataataataaaaaaacttaatctgaaaatctataattgcaatggaatattttaatatatccttgcagaaaattaaatagacaagtgatagcatacaagttatttgaaaagttaataaaatatttctaagaaacatctacagaagcttttgttcaacaaaaacatacacatggtttttaatcacatataatgaaacaaaattgaaaatgtactgagagatgacattcaactgtaataggaaacaccgacaatctgcttgatattaggaaggtgcttattcttacactgtaggactgggtaagtgcattccctgcacagtgcagtggagaagcagacacccatgtagttctttttgactgcaccactgtagttgtcacggtggaatcagaaacacatagtcactggtactgttaacaaaacatggtgtttattacataaataataccttggataaattcaacctagagatgaggtgagtcagagcatcagagaatattcccaaccttaagagtctaaatggttgcctggtggacacattagagtttctaggaaaatccaaactgcagtgcatctttgagtagaacttttgaagacaatttgtggaaaactacatctttgaaaatatggcagctggggccatgcacagtggctcacgcctgtaatctcagcactttggaaggccaaggtgggcagatcatgaggtcaggagtttgagaccagcctggccaacaatgatgaaaccctgtctctactaaaaatacaaaaaaaatttagctgggcttggtggtgggcacctataatcccagctacttgggaggctggggcaggacaattgcttgaacccagaaggcagaggttgcagtgagccaagatcgtaccactgcactccagcctgggcgacagagcaagactccatctcggaaaaagaaagtaaagaaagaaaagaaagggaaagggaaagaaagaaggaaggaaggaaggaaaatatggcagtcaagcagttagtggtggttctaagaatactctcaattggcagagcaaaggatcaggacaatgtggtggaagcaggtgtccctgaagctcctatgcatccatctgtctccacatatggtggctataaaacctgactaatgctttcttcacttctgccttccatatctcctgcaagtaggctattggtgaattataccgtggagccataaaaggttagattatagaaaacataggtcacaacataacccatgttaacacaatccaggacagccatttccagctataggttatatggttctatctcagatctctcttattaatacaaagtctattattcaaatcacagccagaaggaattacaaacagcaaacagaagatgaaaataataattccaatgagagagtatactgtatgataaactttgcagactcaaaaatttattatgattattttttagcataaaaaatagaaaaaagggtactctgtcttcctctaaaaaagcctcttttggtcagaaagatgaaatacatataatgatatctagtacctgccacataaggccagtaggaaatcctaaaaattaccaaattgtcattttttgatggcccattacagcacaactaaaaaatacataaaaatcaaaactgctagcttattataaatacacttcaattcactcatgaatctaacagacttcaatatggaaagacaaaatttcagaaactgatttaatgaaaaaatactatcaattcaacttgtgtacaactgtataagagcttacagaattatctcatctcagtgttcttttgtgaaagtaatagaaatccataattcagagatccattttaagaatcagtaactgataatatgttttatcacatttctgacatgttgtgaattttctagaacaatatacatgaattaatttgcatcaggctttcccatattatctacatttatacagtacctccctagtgggagtttcaacatgagattgaagtttcacacataagggagtatcacatgagcatttgttaaaatggaaaacattgctatatctcacttttataggatttctatccagtctgcattctcacatattagtatgtgggccaactgaaggctttctcacaatgtctatatttaagaagtcgctttccagtgtgagtttgttcatggtttccaagtaaactaagacaaataaaggtttttctacattttttacatttatagggttttccacattctttacatttttaaggttataaattctttacatttatagggcatatgaaaattctttacacttcatatgccttctcatggtccttaaaaggtcatatgaccattgaaggttttcccacactgcctacattcgcagggtttcctgtccagtatgaatgcttcctcatattcacatgtaaataactgaaggtattcccatgtcttatagggtttctctgaaatatgaataatttcatgtcttcaaaaggaaatgggggccgggtgtggtggctcacacctgtaatccaacactttgggaggccaaggcaggtggatcgtctgaggtcaggagttcgagaccagcctggccaacatggcgaaaccccatctctactaaaaatacaaaaattaagtgggcatggtcgttcacacctgttgtcccagctactcaggaagctgaggcaggagaatcgcttgaacccaggagacagaggttgcagtgagctgagatcactctactgcactccagccagggcaacagagtgagaattcaactcaaaaaaaaaaaaaaaaaaaaaggaaataggacaactgaaaactttgccatattgcttatatacatagggttactctccactatgaactctttcatgtattcgaaaggaacgggaacacttgaaggctttaccacattgttgacatgcatagggtttctctccagtgtgagttcgttcatggattcgaaaggaacgtgagcaactgaaggctttgtcacattgtttacattcatagggtttcactccagtgtgagtcctttcatgcattcgaacagaactagaacaactgaaggccttaccacattgtttacactcataaggtttctctccagtgtgagtcctttcatgtattcgaatggaactggaacaactaaacgccttaccacactgtttacattcatagggtttctccccagtgtgagtcctttcatgcattcgaaaggaactggaacaactgaaggctttaccacattgtttacattcatagggtttctctccagtgtgagtcctttcatgcatccgaaaggaactagaaaaactaaaggctttaccacactgtttacattcatagggtttctctccagtgtgaattctttcatgcattcgaaaggaactggaacaactgaaggctttaccacactgtttacattcatagggtttctctccagtgtgagtcctttcatgtattcgaacagaactggaacaactgaaggctttaccacattgtttacattcatggggtttctctccagtgtgagttctttcatgcattcgaaaggaactggaacaactgaaggctttaccacactgtttacattcatagggtttctctccagtgtgagttcgttcatggatttgaaaagaactaggacaatcaaaggctttcccacattccttgcatttataaggtccatttccagtgtgcattatcatatgtcttcgatagcttggaagagaaatgaatgctttcccacattccttacaatcatagggtttctctcctgtatgaattctttcatgttttctaaaggaactaggaaaactgaaggctttcccacattttttacatttatagggtttttctccagtgtgaatcctttcatgacttcgaaaggatgtgggacaactaagagctttaccacattgcttacactgatagggtttttccccagtgtgagtcctttcatgtatttgaaaagtttggtaatatctgaaagcttttccacattgtttacattcatagggtttctctccagagtgagttctttcatgatttcgaaaagaactgggatgactgaacgttttcccgcattctttacatttatagggtttctcccctgtgtgcattctcatgtgtcctcgaaaggttgtgtgataaatgaaggccttcccacattccttacattcataaggtttctctccagtatgagttctttcatgtatttgaaaggaactgggccaactgaaagccttaccacactgtttacatttatagggtttctctccagtgtgagttctttcatgtattcgaaatgaacttcgaaagctgaatcttttcccacattccttacattcatatgatttctctccatatttgtgatattcatatgatctatgttcagtatgagatctcatgtgcctattaagagatgaatgacacatatagtcctttccacacacactacattcatatggttttactctagtaaaagttttcttgtttggtttaggatttggagtctgactgatggtttctccaaactgactaccttctttcctttcacagagcctctctaccatatgacttctgtgagaaaaaaacaaaacaaaacgcacaattagtggctttttaaaattaataattttataattattgattatttcacaatcattagtaggtagtagaattacacttttgccattttcagggaaagtgtatgtcatgaatgctcaggaagagtacttgaccagagctattatcaaaacaataaaattcatcacatagagtttatttctttttttttttttttttgagacagagtcttactctgttgcccaggctgcagtgcagtggcacaatcttggctcactgcaacctccgtctcctgggttcaagcagttctcctgcctcagcttcatgagtagctgggattacaggtacccaccaccacacctggctaatttttgcatttttagtagaggcagggttttgccatgttggccaggctggcctcaacctccacacctcaggtgatctgcccaccttggcctcccaaagtgctaggattacaggcatgagccaccatgcctggccaaaattcataatatagagtttcttaatattgtttccaggtgaaatatttttcaaatactgaacatctgtaccatttttaagaaaacgttcttggcaaaaattttcaaaaaataaataaatatgaaatggggcttatttgtttcaattattcattttttaaacctaatggcatgctaagattctctcataagacagtattttcttttgtaagtacaactcaccttagctttctcccctgatttttgtgatcttcaatgttcttctcctcccagttttcccctaaaatgcaggcccagaaaaatcattaaacctattcgaaattacagaaaaattattagattctaaatctaggatgagctgttatcctgtctgatttatttaccaaagtattccctttcaacattctaaaccttggaaccttgctgatgagcaagaaacacttgttctctaattgactaagtgagggaataatttcattcttacctatagaggccaagttaacaaaggtttcttgcatcacatctctgtagagtttcttctgagagggacccagcaaagcccactcctcctgggtgaagttcacagccacatcctcaaagaccactgagtcctgaaacatcccacatgtataggggaggatgggtgagactgacagcactggggatataaactcagttcattaaaagttcatatataattttctccatttatcctgtaactttgtcatcagaactcaaatcttcgtccacacttacttcttcataaatttaacaccaccatgaatacttggaaattatttctacatttttagtatgatcacttcaagtcttatgctctccaatgacaggatacacagcatcttagagaaatgctatacgatactctccctctccctctccccacggtctccctctccctctctttccacggtctccctctgatgcagagccgaagctggactgtactgctgccatctcggcacactgcaacctccctgcctgattctcctgcctcagcctgccgagtgcctgcgattgcaggcgcgcgcgccgccacgcctgactggttttcgtattttttttggtggagacggggtttcgctgtgttggccaggctggtctccagctcctaaccatgagtgatctgccagcctcggcctcccgaggtgccgtgattgcagacggagtctcgttcactcagtgctcaatggtgcccaggctggagtgcagtggcgtgatctcggctcgctacaacctccacctcccagctgcctgccttggcctcccaaagtgccgagactgcagcctctgcccggctgccaccccgtctgggaagtgaggagcgtctctgcctggccgcccatcgtctgggatgtgaggagcccctctgcctggctgcccagtctgggaagtgaggagcgcctcttcccggccgccatcacatctaggaagtgaggagcgtctctgcccggcggcccatcgtctgagaggtggggagcgcctctgccccgccgccccgtctgggatgtgaggagtgcctctgcccggccgcgaccccgtctgggaggtgaggagtgcctctgcccggccgcaaccccgtctgagaagtgaggagaccctcctcctggcagccaccctgtctgggaagtgaggagcatctccgcccggcagccaccccatccgggagggaggtgggggtcagcccccgcacggccagccgccccgtccgggagggaggtgggggtcagcccccgcacggccagccgccccgtccgggagggaggtggggggtcagcccccgcccggccagccgtcccgtccgggagggaggtggggggtcagcccccgcccggccagccgcccagtccaggaggtggggggcgcctctgcctggccgccccttctgggaagtgaggagcccctctgcccggccaccaccccgtctgggaggtgtacccaatagctcattgagaacgggccataatgacaatggcggttttgtggaatagaaaagggggaaaggtggggaaaagattgagaaatcggatggttgctgtgtctgtgtagaaagaagtagacatgggagacttttcattttgttcagtactaagaaaaattcttctgccttgggatcctgttgatctatgaccttacccccaaccctgtgctctctgaaacatgtgctgtgtccactcagggttaaatggattaagggcggtgcaagatgtgctttggtaaacagatgcttgaaggcagcatgctcgttaagagtcatcaccactccctaatctcaagtacccagggacacaaacactgcggaaggccgcagggtcctctgcctaggaaaaccagagacctttgttcacttgtttatctgctgaccttccctccactattgtcctatgaccctgccaaatccccctctgcgagaaacacccaagaatgatcaataaaaaaaaaaaaaaaaagaaatgctatacgattgaagcaaatatttccagtttaagaccaacaattccttgtaagaaaaatactttttatctcctgctttatcatgtactatatcactcagcatcccatgaaacacagggtcaaatctgtacgagattttttttttttgagacagagtcttgctctgacgcccaggctagagtgcagtggcgcgatctcagctcactgcaagctctgcctcccgggttcacgccattctcctgcctcagcctcctgagtagctaggactactggcgcccgccactatgcccggctaattttttgtatatttagtagagacggggtttcactatgttagccaggatggtctcgatctcctgacctcgtgatccgcccacctcggcctcccaaagtgcttgggattacaggtgtgagccaccgcacccagccacgagattttaatgaataagtatatactgaagaactgtacattttttcttctattcccatgattacactgaaaagccagagggcccgtgcaacttgcaacaacatcctgctggccatgttgtaccgaagtactgcagaccattagaattagtcagatccaactggtggagtgaaaatattcttttagtgaaatattaattttaacttgtttgtataatatttatcacagacccagtgtttcttttttctccctgtcccatttgatggaggcaggaggttactgggatgttagagcacaggcaggaggaaaaaggcatggcaacttagatcataaaaattaaatcttcaccaggcgcggttgctcacgcctataatcccagcactttgggaggctgagaagggtggatcacgaggtcaggagatagagaccatcctggctaacatggtgaaaccctgtctctactaaaaatacaaaaaaattagctgggtgtggtggtgggcgcctgtagacccagctactcaggaggctgaggcaggagaatggcgtgaacctgggaggcagagcttgcagtgagccgagatcgcaccactgcactccagcctgggtgacagagcaagactctgtctcaaaaaaataaaattaagtcttcaaaaaatccccacactcatgagcctcaggactgcgaccactgttagcacacataggatggagatgataagatgccagaacagctctttccctcagaaacctaacagtgtaccctgagacttaacgaatttgagtaacaggttaacagtttcaatttgcaagggagttcacccaagtccacaatggtttcatactgaatttgcccatgattacaaaattcaaagggttcagcagtgctgtcctccaaaaggatatgaaattccctttctccaatttcagaaagaagtgatccgcaaacagctactctagaggctggccatcctcccaacgtctctcattttaggctcccgtgaggtacgtggtggcatgagatcccgacaccaaagcataggaatccctcagtggcataattcccctaaatcttggcctttgaaaaagatcattaacctactgatgtccatatgcaaaggacagaaaaaatgctcccaaacagcaatcctgatactagaatttacctatttggtaaagtaacagaaatatccacacctttcttgttgttgggtcaaaggagtaaaatgagctgatcacgtaagttctaattgttccttgtacagtggttctatggcacttgttcaaagaaattcctactacctagtgtgcagaagactgttaacattagtaaaatgttaacctaagactacttatctttaaatgcctgagggtatatattcaattcataaaaagttcacatatgattctgtggtctccaaacatttgttgtccttcactgatatctgggaagtgagaatttgggagggaccccgccaacctaagtgataaagagtggcttagtgtgtggctgggtgcagtggctcacgctgtaatcccagcactttgggaggctgaggtgggcggatcacaaggtcaggagatcgagaccatcctggctaacacagtgaaaccccgtctgtactgaagatacaaaaaattagctgagtgtgatgtcgggagcctgtagtcccagctactcgggaggctgaggcaggagaatggcgtgaacccgggaggcagagcttgcagtgagccaagatcatgccactgcactccagcctgggcaacagagcgagactccacctcaaaaaaaaaaaaaaaagagtggcttagcgtgcctaaatggtttatggaatcaatagagtatatattgaactccttttttccttcttagagtctggactttttcacatgccaggcagaggatgcctacttgatccgccccccaaaagcactgtgagcactgggtctctaatgagcttccctagcagacaatatatcatatcacaacttgttgcttggggaattgagcccattccatgtgattacatcaggaaagaacatttaaaggcttggttgcatctgctttcctccacaccaactatgactaaataaggctaataaaggatatttaataatcctaattttaaaaatgttattgggtaatgtcaaagcagaattaaattaaggtggaagttggtacatgttctcagaacaaactcagtgtcaacaagatgccactgctcccaaatgatatctttataaaattctacaaatccctaaaatagacttataaaattcttaaaatagacttataaaattctacaaatccctaaaatagtcaagaaaaactacttttccaaacctaagaggaacaataaatgtcaaacaatgggtaaagtcttttgaagagcaacataaatacttgcctagtatgtatcaaggattttcaaactattaacactccaaacagcatgacacacagagagctaaatagaacaagggaggggaaaagtgtcttcaatggactggcatttataaggaaaattgattaatgatagagcaaccattgtagggtagtggaagagatcactaacacttcaatatatgcagaagggacacactgttgtctaactggaaaaagcattgcatcagctcttttccatagacaataatcaatttaatgtagatttaaatgtgaataatataattaaaactgtttcaaaagtcacaggcaaacttttttaaatgcaagagtagggagaattttctcatgtaagagtaagccataaaggatgagactgaaaagttcaaacatactaaaatcaagaaagttaaaagacaaatcacaaagcaggaaaaaaatatgtgacatacatgcaatataaatgaactagtatgcagagtaaaaataaatgaacagtcaggcatgatggctcacacttgtagtcctagctactcaggaagctgaggcaggaggatcatatgaacccaggagttagaggctgcagtaagctatcacaccagcctgggtaacagggcaagactctgtcaataaataagtaataaaatagccaaataaataaaaagtgaacacatgatttaaaaacggaaacacaggccaggcacggtggctcacatctgtaatcccaacactctgggaggccaaggcgggtggatcacctaaggtcaggagttcaagaccagtctggccaacatggtgaaaccccatctctactaaaaatacaaaaattagccaggcatggtggtgggcacctgtaatcccagctacttgggaggctgaggcaggagaactgcttgaacccgggaggtggaggttgcagcgagcccagatcgtgccactgcactccagcctcggcgacagagcgagactccatctcaaaaaaaaaaaaaaaaaaggaaaaataatgaaaacatatttaagagaggatgacacaccatatatatgaaaaaaggtctggctgggcacggtggctcacgcctgtaatcccagaactttggaaggtcgaggcgagcagatcacttgaggttagaagtttgagaccagcctggccaacatggcgaaactctgtctctacaaaaaatacaaaaattagccaggtgtggtggcacgggcctgtaatcctggctactcaggtagccaagacacgaggattgcttgagcatgggaggtggaggttgcagtgagccacgatcgcgccactgcactccagcctgggtgacagagtgagactctgtctcaaaaaaaaaaaggaaaaggtacatctcgctccttccttgatacagccaaatgaaataccaaatagatccaatttcttacatattagaaggacaaaaatcagtcaattagctactcccaagtattgatgaccactgccaatagacaaatagttatgcatgaatggaagaaagatcaactgatacactccattgctatttcctgtatatttgaacttgaccataatctatagcacagtgatttttctccaacatccagagaagttattgtgtatttgtacttagacacagataccaaaacaataggatcagtatttttcacaagagcaaaaaatgaactggaaaaagcccaaacaccaccatcaatggattggatgataaaattggattcccccagcctgtcactatcatgtgaaacacagaggcaaaaccactcaaaaaccttttcattgttaattccactaatactcatgtatttaaagttcaaataaggctcaactaaaagaacatcacatagtgaaatggaagataaaggtataaagaataatcaaataatcaagactgtggccatctatgaagcaggatggagataagccagaggagaacatcaatagactaattaatgactgaccaaagctcacctataaatttatatttttaaatcacttattgaggcaatgattgacatgaaaaagttgtacatatttaatgtatacaactcaatgagtttggggataagtatacacctatgaagccctcagtatcataaggacatagacatattcatcacaaaagtttctttcccccttcattattattactatttgtgtgtctctctatgtgttaagaatacaacataatatctattttagaaattttaagactaggcacagtggctcacacctataaccccagcactttgggaggccaaggtgggaggatcacttgatgccaggaattcatgaccagcctaggcaacatagtgagatcacatctctagaaaaaaatgtaaaaatcttaggtgggtgtggtggcatttgcctgtagtcccaggtacttaagaggctgggacaggaggattgcttgagcccaggagtttgaggctgcagtgagccacgattgtgccattgcactccagcctggataatggggcacgatcccatcttaaaaatgaatacaaatttttaaacatttttaaaaggaatgtttaactataaaatcattgtgttgttagctataggtactatgccatatagtagatcttcaaagctcatttatctgcataactgaagctttgtattcttcagcttcatctccccatttcccccttcccctgcaaattaccattctactctatgcttctatgagtttgattattttagattacatatataagtgagactacaaagaatgtgcctttctgtttggcttatttcactgagcataatgtcccctacgtccatcaatggtgttgtcaatggcaggatttcctttttttaaaggctaaatcatattttattttatgtaaacatcacacattcatctgttgacacacatttaggttgtttacatatcttggctgttgtgaacaatgatgcaatgaacatgggagtgcacatatctcttcaagatgttgatttcaattcctttagataaatatggagaagcagagtgctggatcatgtagcaattccttttctaattttctgataaacatctatgctattatccataatgcctgtatcaatttaaatttaaacttctaccaacagtataccaaggttcccttttctctaaatcctcaccaacacctgtaagactataaatatatgtcttagcagaaaccttggatgtcaagagagtgggacaatacattcaaagtgttaagctaattagcaacacaaaaagatatgaaagtataaaactcatgggtaaaggcaaaagtatagtcaaatccagaatattcttatacataatggtggtacaaacatcactttcaactctagtataaaagctaaaagatgaaagtatttaaagtgactatagctaccataacttgtaaaatggacactgaatattaaaaagatgtaaatcctggccaggcacagtggctaacacctgtaatcccagcactttgggaggctgaggcaggcagatcacctgaggtcgggagttggacaccagcctgtccaaagtgacaaaaccctgtttctactaaaaatacaaaaattagccgggcatggtggtgggcacctgtagtcccagctacttgggaggctgaggcagaagaatcgcttgaacccaggatgcggaggttgcagtgagccaagatcgcaccactgtactccagcctgggcaacagagtgagattccgtcttaaaaaaaaaaaaaaaaaaaaaaaaatctaagcatctacatgaggaaagcaagaaaatatgagcaaattaaacccaaagtaagcacacaacagaagaaatagtaaaaagagaaattaaacaaaaccaaaggtgtttctttgaaaagatcaatatatttgataaatgtatggttaagctaactgaaaaacagagaacagaaattactaatatcacaaatgtaagtgggaaaaataaaaatgaaaaagctatgggcaaaatccaacatgcatttatgataagaaactggagatagactttcctctttttgagaagcagtatttataggaaacctgcagctaatatcatatttaatagtgagaaaatagatgctttcctggtaagatgaggaaatgggcaaagatgtcccctcttaccactcctactcaacagattgtactcaaagtgtaactaatgagaggagaggggaggagaggagagaagagatatagattgggaacaaagaaatatcactgtctttgtcgcatgtgacatgattgtctaagtagaaaatctcaaagaatccacaacaaactcctcaaactagaggttgaggatataatcttaatatacaaaagtcaattgccttcttacagactcacattagtatagtatagactcactgagtcatctgattttcaacaaatgaccaacagcaattcaatgaaaaaagatagcctttttcaacaaacagtgttggaaaaactgaacatccacatgcaaaacacaatgaaaaaaacacaaatctagaaacagacgttacaccttaaacaaaaactggctcaaaatggatcacagaactaaatgtaaaatctaggccaggagcagtggctcatgcctgtaatcccagcactctgggaggccatggcaggaggatagcttgaagtcaggagtttgagaccagcctgggcaactaagtaggaccccatctctacaaaaaatacaaaaattagccaggtgtggtggtgcacgcttgtagtcccacctactcaggaggctgaagtgggaggagtgcttgagcccaggaggttgaggctgcagtgagccaagattgcactactgcactctggcctgggcaagagggagaacttgcctcaaaaaaaaaaaaaaaagtaaagttataggatactaaaagttaatgaagaaaatctaggtgaccctgggtttggtgacaaatgtttagatataagcaaaatccatacaaaataaatcagtaagtttgacttcattaaaatgcaaaagctccttctctatgaaagctctgtgttaagagaatgaaaaagactctagagccttttgcggtagggggacccacttaaggtgggccaatttgcaattaacagcataaagtggttaagtaaaatttataaacaaggaatatgttgcctccagaacatcaaaagaacctagaagatgctgtgggtagtcagagggacaatagctatttcatagtagtgtcagggatggagcggccctccttttaccaaatggtttttaggaacttaaccaaaacataaaggtctcttattttatatatggggcaatggactttttgtaagctctattttttttttcagtatttatgtgtcctgaatgaatgccaaaacaatgtcctcagacaaggctgtcattaatgtaatatcatacctgtgttctagagaaaggtggatgcagttcagattttgcctgcaaagactgtgcaacagcaaggctgttgaggttcccttgggaaactaggtaaagttatataattagcctgtgagatggtgaaatctgtgagatcagctggatggtgtcagtaatttccatgttggatattggtataggggcttaatgggtgggaccacagcattaaggttatggtaatccattgtgggttgccattcattctctccaagtttaagaaaggccaaactgtacttttaaaacgagaagcacggggaataatcacttcctcactaaacaagttttacataatacttttcaacccttcaaggccctgttcaatttatattgagccatcataactaatttaactggggagtaagttccacagggtctcattctgtcaagccagtttgtaagtgccaaagatttaatttaaatttcacttatgactcactggtttagagtttacctgttcattctggcgtattttaggacactgggtgccatgaacatggggaatttaggcacagttatgatggctaagatgagacatacttatttgtcttctattttatattcagtaactcccttaagattatcaggggataccttgcttaaattttagtgggtctcccaggtataaccataatttgagcccttgtattggctaatcctatagtgtgttaattaatacattacataagatgttaaaattaatacagaacctatgatatagaggctcttttatcttttttgccgtctaaattcctttagtctatttggaatttccaattgggtcaaattgtggacctctttttcagcatttttttcttttgttcctttccttcctaacatgtttgttttgtttttgtttttgtccctggatatattttgacagcaaaatcctctctacaggggaggggtgttcttttccctccagagagccacaaatcactattatcaggcttaggggcctgtccctcatggttgctttataaagtttaagcacctgggccttaagctggctttgaatgaaccctttgcaatgctgcagaggaaacatgagtgtgccctataatcctgagggtcagcatccttgctgcaatagagcaacagcagcaacacttaagggtccttgggagccctgtgctattaggagtgtggactcggcccaccatctaacagctgcctttccccctctcttttgtctctttttcaaaaatgactgctctggcaggtagtctttcccatgagcaccttgtatgccaggtcagcagcagtcacagcttcactctaaaacacacagataagtccaggccaagaaacactacccaggaccactttaaggagtatcaaatctcatattcctcttcaaaaaagccaaggaattatcaaaacggccaactccagttggctaaacatagaacccagacttggcagggctcaacatgcagcacagagtagcacaactcaaagtagtagcttcccagaaagcagcagctgaaagtgcatgctggccatcaggcaacagagcaggtagcaattcagtgcaagagaagacagacccatggggtgacagtcaatgtctgaacaccatgctcatggtaacaattcctgtgtcgttccaatgttgacactaataacagcgtggagaacagacaccaaagggtatgaaaagactcactactgtgatcattgaggtcttggggaaagcagggcaggctgcccaagcaggtgtgacatagcttcagagagcaaagaaagcctcctggcctgggtttttattgtagtttgggggtggggctacaagagagtacctgctcaagggcaggagcttctgtggtttgaatttcctgctcccagactttttcagcttgcccaggtgtgcagcacgaggagaagagagaagggtgacgcttatgatgtgcacagccaaaatcaaaacatgcagagtccaactactcattacagaaccaacatgagtatgaaaaacatgcatttgcaattgcttatttttataaaaagaaacactgacagtatgcttaagaaattattaaaaggccaggcacagtggtttatacctataacaccagtgctttgacaggctgaggcaggaggattgcctgagcccaggagttcaagactagcctgagcaacatagtaagactccatcactacaaaaaatttaaaaattagctgggagtggcagcacacacctgtagtcccagctactgaagaggctgaggtgggaagatcacttgagcccaggaggttgaggctgcaatgagctatcatcatgtcattgtactccagcctgggcaacagaacaagaccccatctcaaaaaaaataaaaaattatcaaaagtgagtatttggggggtggctagagcaagtgccctggctggactggaccagaatatgctggcagtgagtcttttcaagttagactcaactattgtggatttttttctaacttccacatgcatgatttctttaaaataaacagctaaatttaaataagccatattttactacttaataatcttcatttttaatcaacttacttttgctttttaaattttgattaaaattttctacgtatgaaacaatcctaagacttaatccaggccgggtgcgatggctcacgcctgtaatcctagcactttgggagaccaaggcaggtggatcgcgagatcaggaaatcgagaccatcctggccaacatggtgaaacctcgtctctactaaaatacaaaaaaattagccgggcgtggtggtgcacgcatgtagtcccagctactcgcgaggctgaggcaggggaattgcttgaacctgggagtaggagactgcagtgagctgagattgtgccactgcaccccagcctggtgacagagtgagactctgtctcaaaaaaaaagactgaatccagctgggtgtggtggctcatactagggaattttggtaagccaagttgagaggattgcttgaagccaggagttcaagaccaatctggtcaagagagtgagaccctgtctctacaaaaaagaatatatatatataattaggtgggcatggtggctcatgtctgtaattctagttacttgggaggcagaggtgaaaggagttcagggctgtagtgagttatgattgtgccactgtactctaactaggacaacagagcgagaccctgttttttaaaaaaaaaacaaacaaaaacttaatactttaagcactgacaattacaaaagtgaaaaactttcaaatctctttctaactataatgacaaggtgcattattatgtgtcctaccatctcacactgggaggtgctattgggaaggagtagcatattataatgcattagcattttatcttaagtatgttaggattttcaaatatatatataagctttgagtagttattctaccaaataaagaagttcaggccaggtgcagtggctcacgcctgtaatcccagcactttgggaggccgaggcgggtggatcatgaggtcaggagatcaagaccatcctcgctaacacggtgaaaccccgtctctactaaaaatacaaaaaattatccgggcgtggtggcgagcgcctgtagtcccagctcctcaggaggctgaggcaggagaatggcgtgaacctgggaggcagagcttgcggtgagccgagatcgcgccactgcactctagcctgggcgacagagcaagactccgtctcaaaaaaaaaaaaaaaagttcaattgcattttcctttcagttccagtggaaattcatttgcaataggaatcatatggactttgaggttttttcgtttttgtttttgtttcttgagacagggttttaatctgtcgcccaggctgaatgaagcacactgactcaattttggctcactgccacctctgcctcccaggctcaagggatcctcccatctcagcctcctgagtagctgggactacacccagctaaaattaccacacttggctaatttttttttttttttgtagagacagggtttcgccatgttgcccacgctagtctcaaactcctgggctcaagcaatccacctgcctcagcctcccaaagtgctgggattacaggcatgagccacgatgcctggcctcttttaaatttccaagtactctatgacatgcacatacaaaaaccgatctaaaaatgaaaaatgtacctgagaatgtaaatacattcatctcttatcttgaggttctcttgcctaaaagaaacaaatattctgtttggttccagagttttctttttttttgttttgagatggagtcctgctctgttgcccaggctggattgcagtgcacaatctcggttcactgcaacctcccctgcaacccggggttcaagcaattctcctgcctcagcctcccgagtagctgggattacagccacccaccaaaaattacatgtctggttaatttttatatttttagtagcgacagggtttcaccaagttggccaggctggtctcgaacttctgacctcaagtgatccttctgcctcagcctcccaaagcgctgaaattacaggcgtgagccaccacacccggcctggtttcagaattttcttgccttagttgcatcatacctttcaatcgacttacattttcaaacccaagaaacaaaatttaacacactcacatatggaataacattaaaaagtgttaacagaaactagaattcagctgctgtaatagtcagcaaataaaggaatccaaagggaaaaaaaaacaccagcctggacacagtgaggatctacaaaaaatttacaaattcaggtgtgacagtgcacacctgtagtcctaggtacttgggaagctgaggtgggaggatcatttgagccaagaaaggtgttcgaggttacagttagctatgatcacaccactgcactctagtctgggtgacagagtgagacactgacttaaaaaaaaaaaaaagggaaggaaggaaggggaaagaaagaaaggaggaaggaaaggaagaaggaaaggaaaggaagaaggaaaggaaaggaagaaggaaaggaaagggaaaggaaagccaagccacatctgtaatcccagcactttgagaggccaaggtgggaggactgtttgaggccagcagtttgagaccagcctggccaacaaagtgagaacccacctctaaaatacacacacacacacacaaacacacacacacacacacacacacacacgctccctctccctctccctctctctctccctctccctctcaagtcagctcagactagcagactgcttctccacaattcagaaggaaaacccacactcagaaagctaaacacatacacaagcttggggcccacattcttgctgttgggcaacaacctttagagtgagacagtccctggtgacagagggcaggggcacctgaggagccaaaggaatgaactcagcgagctccacacattccctcacccctggtgacagggaaatcgccccttcaattgttgtaagtgaggaaactctcaactggactgagattaaggttctgacccaaatgaactccccagttcattcatcctgtgtccaggagacagatctcctggcctttacagactttctcactatagaaaaattacactgagtgcacctacacaacagatgcaaaactcaaacctaatgtctaaaaataggcccaaggaaaccacaattatgccctcaggaagggcatcactggattcagccaatcccccaacgtgcattcagatccccagctttccagtgctcagcagcttctctcagtacaaagggctccttccacagtaggtatgagcaggtaggacacctgcaggggaggctccctaggaagaaacaactgggccttcgattacatcccttgggagacccaagggttggtcttagagcttggagtcactgacctgagtcctctttgctctccagtcaagtgacctggaccactactgatatttacatgagacaaaccctgtgtttgaagaaatcaaaggggaggctgaggcaggtggataacctgagcccagaatggaattccatttgaaatcaccgaaaaggaaagaacagacctgaggaacttgctatacattctcagaagaaaaaaagagaaacaaaaatttttaataaatgcaatatcatactgggatatttcattattattattttctgtttttgagacaaggtgtgagaccttgctcagcctggagtgcagtggcatgatcaaggctcaaagcagcctcaacttcccaggctcaagcaatcctcccgcctcggcctcccaagtagctgggactacaagtgcaggccattacgcccagctaattttttttttttttttttttttttctagtagagatgaggtctctctatgtcacctaggctggtcttgaactcctgagctcaagcgatcctcctgactcagcctcccaaagtgctgagattacaggcgtgagccaacgctcctagcttgatattttattattttctgaaacccatctctttcttgcctctttggaaatattttacatccactctaaaggtttattttattttatttttttatttttttgagacagagtctcactctgtcgccgaggctgtagtgcagtggcgcaatctcatctcaactgcaacctctgcctcccgggttcaagtgattctcctgcctcagcctcctgagtagccgtgattacagatgtgcaccaccacgcccggctaattttttatatttttagtagagacggggtttcgccatgttggctgggctgtaggtctcctaattacgtatattttacattttttgagaatcaattaagtgagtaaatcttttcaaggtgataagcccagggaggggaagtgctgcgctggaaaggacagatctcccagaaaagtttccaaaaaggagactcaacccaaaggagttcccataggatgtcaggtcccaggagagatactggcaagagaggcacaagcattttacacgaggtagcttcaagtccttctcctctgttttcctctcatataaataccccaaagcatacgttaaatctttttaaaagaaccatccattcctctgtacaaaaaggataattaaaatactgcgtctggttgaaataacgacgttgtgaactggagagaagacattggcatttgaaagagatctagaaatttagggatttaatcccagctctgggaagagccaggctggaggacacggtcgtgggtttgagatctggcttcccatacacttggaaaccttgagaaacgagtcctcccttgggaagaaaagagggactgaggaccccacacaacactgctcctcccacgcacgaaccccacgaccgagacgggattccctccatgaccctcccgtgccccagcacaatctggggagacgcgaggctgcgggctcggagctgcccagagagggctccgggactggggccgcagtcgccgcgcagggacttgacaagacgtccggggtcccggctgccggcccagccccatcctgcggccaaagagaccgagggccgagctgcgccaggaggactcgggtccacagacccgggagacaacggcggggaggcctgggtcccaccacagccagatccggccggtttcaacccgcccctctctcccatctcaagacccccagccccgcacacttaccatttcccagactctgggatgtcctggtgttctgtttacctctcccgcggccagcacaggtcctacctccacctgaggcccttcctccacctgagggccttctggggtgaggagaccccagagcggagcgcagcggctggtagccacgccctcgccgtttgcgcagcgcccctccgcccgccttcccggcggcgcccctgattggacattgcactcttggacccgccttcgttgcctgagtgacagctagtagggaagtcgcgtctctaagcaacctgcattcgtccggggtcaggaatctgttcccctgccacggatatttgcgtctaagcagaatttgttaacgtacccggggtcgggcactggtgtcttcctgcagctccttctgagcgcggagacacaagcgtgcacagcgcaggaaattccaggctcagtttccagaaaaaggctctttgtccacagcgaaaaaggacgcccgggccatgccagactagaacggaagggtcagacgctcccagacttagcataaggctgcgaggccattcatggatttctgactcttgtttacaaatacagacacttagagtgacagagtgacctcatcatacctaacaaagagtgactacgttttaatctttgacaactgacagggtttaggccgtcacccatcccttccctccccccacactttgctctagtgggaagtttggaccccacagccctagtctgagagaaggagttcctttttttttttttttcggtagagatggcggtggtggggtggtctcactatgttgcacaggctagtctcgaactcctgggctcaggtgatgctccttggcttcccaaagtgttgggattacaggcatgaaccaccgtgcccagtgaggaattattcagttaaacccaaagccatgagatgtgttcagtaaaactgaacactggaaggatatttatttcggaccagtttttgactatgtccctagagaacttttgtggatcctttatgtttgtttggtttgtggtttttgtttttgagacagggcccttctttgtccctcaggctggaatgcagtggtgcaatcagagccccctgcagcctcgaccttctgggctcaagcaatcctcccacctcagccacctgagtagctggaacctcaggcacgtgccaccatgcttgactaatttctttctttctttttatttttattttgtagaaacagcatctcactatctcacccaggctgatcttgaactcctgggctcaagtgatctgctggcctcagcctcccaaagtgttaggattacaggcatgagccactgcacccagcccctagagaattttgaaatgtaaatggctatgatatcgataaggcaattaattccattttcactgagattatttaaaaaaccacaaaagattatgtaaatttggcatgtactaggaaactcaatatacttaagatattggatcaaacctactaatgggcagggcatgatggctcacacctgtagttccagcactttaggaaacttaggtgggagggctgcttgagcccaggagtttgagatcagcctgggcaacatagtgaggcccccccctcccccatctctaagaaaattttttaaaaattagcagggcatggtggtgcacacctgtagtcccagctactggggaggctgaggcccgaggattgtttgaacccaggaggtcaaggctacagtcaactgtgatcctgcattccagcctgggtgacagagtgagaccctgtcagaaggaaggaaggaaggaagggagggagggaaggaaggaaggagggaaggagggaaggagggaaggagggaaggagggaaggagggaaggaaggaaagaaggaaggaaggaaggaaaaaaaaaggaaacccctgtagcctttggctgtcactgtcctatcttcccatcttcctcctccaagcctctgtcctaagcaaccattaatttactttcagttgctatatagctttcccattgtagacttggaatggaatcatatactatgtgttctttgtgagattaacttcattcacttagcataactgtttcaagggacatttacattgaagtttgtatcaatacttcatttgttgtttacagtaaaacaatatttcattgtaccaatatagcccattttgtttatccattcatccattaataggcatttggtttgtatccaccttttagttgttattaataaggttgctataaacatccatgtacaagtttttctgtagacataggatttcatttgtcttgggaatacacttaggaatggaatcgatgggttacatggtaattctatctttaatctttgaagagctgccagactcttctcctctcctttgggaaattctattacacacatattggtcaactaaatagtgtcctgcatatttctcaggctctgttcatttttctgttttctgtttttgtttttttaagatgtaatcttgttatgttacccaggctggactgcttcagcctcccaagtaagtgggactacaggtgtgcactagcatgcccagcttaaagaaataatttctattttgatatgacacctgcagatccccctccctcccccaaaaaatctttttttttttttttttttttttgagacggagtttcactcttgttgcctaggctggagtgcagtggcacagtctcggctcactgcaacctctgcctcccaggtacaagtgattctcctggctcagcttcccgagtagctgggattacaggcacctgccaccatgcccagctaatttttttgtattctttatagagacagggtttcaccatgttggccaggctggacttgaactcctgacctcaggtgatccgcccacctcggcctcccaaagtgctgggattacaggcctgggccaccacgcctggcccgaaaaatcttattctccagttatctcctgaaaaacagtaggcctacagtctacactatatcttgattaaattcctagatctcttcccaattgattttcacttcttttttgaaacagactctcaccctgtcacccaggctggactgcagtggcgaaatctcagctcactgcaaactccacctcctgagttcaagcgattctcctgcctcagcctcctgagtagctggggactacaggtgtccgtcaccactccagctaatttttgtatttttagtagagaccgggtttcaccatgttggccaggctggtctcgaactcctgatcataggttcacgccattctcctgcctcagcctcccgagtagctgggactacaggcgcctgtcaccacacccggctaattttttttgtatttttagcagagctggggtttcactgtgttagccaggatggtctcgatctcctgaccttgtgatccgcccccccttggcctcccaaagtgctgggattacaggcgtgagccaccacgcccggcccactcctccactcttaaccactattctcttttacaattttatacctttgcctttttcagaatgtcatataaatggaacacaaagtagtcttattagtcctgttttcaaatttgacgacttatttgtaaacattgatacagtacctgcagtgttctgagtttttttgtttttttttttttttgagacagaatttcactcttgttgccccagctggagtgcagtggcgccatctcagctcaccacaacctccgcctcctgggttcaagcaattctccggcttcagcctcccgagtagctgggattacaagcatgcaccatcacacccggctaattttgtatttttagtagaaacggggtttctccatgttggtgaacctggtctcaaactcccgacctcaggtgatccgcccgcttcagcctctcaaagtgctaggattacgggtgtgaaccacagtgccctgccaagttttctatttttgacagtgcccagtacaggtggtggcacacattcgaacttcaaaactgagagattacggggctgggcacgatggctcatgcctgtaatcccagcactttgcttcagcctccccagtagctggaattgcaggcatgtgcaattttgtatttttagtagagatggggtttctccatgttggtcaggctggtctcaaactcctgaccacgtgatccgcccgcctcggcctaccaaaatgctgggattacaggcgtgagccactgcgcccggtctatattctggttattaattccttgtcagatgggtagtctgcaaatattttctcccattctgtagcttgtcttttcactttgttgtacagaagctctttacttaatgtgacccctttatctatttttgctttggttgcctgtgcttgtagggtattactcaagaaatctttgcccactccaatgttctggagaatttccctatattttcttttagtagtttcatagtttaaggtcttagatttgagtctttaactgattttgatttgatttttgtatatggtgagagagaggtctgtttcattattttgcatatggttatccagttttcccagtctctttattgaagagactgtccttttcccaatgtatgttcttggcacctttgtcaaaaatgagttcaccatagatgtatggatttatctctggcgtctctattcaggagtttaagaccagcctggccaacatggtgaaaccctgtctctaccaaaaatacaaaaaaattaactgggcacagttgtgtgcacctgtagtctcagctactcgggaggctgaggcaggagaaccgcttgaacctgggaagcggaggttgcagtgagccgagatcacgccactgcactccagcctgggtgacagagtgagattccatctaaaaaaaaaaaagacggagagattccattagcactgtgggctataggaatgtaggcaagaccttgtgctccctatacttcaaatttttcattcataagataggacgtatggttggatggggctagtcaaatgaaatactaatgattatatcacattaatttccaatgacatatagtgagatgcatatatgtcattgaaatgttggacaaaaattaggttttaattgctctctagtaaaacacaaagctgttaactttttttttttccatcttccctaacgtgtgctggaggtctaccatatggaaatgatacctgcggacagtttcatgggcttttgggtctttgtggatcattgaaacaaaaattacccagctacttctcttgtttaaaaaagcattaaagattgaaaatgtcaaatatactttttttttttttggtagagacagagtctcgctctgtcgcctaggctggagtgcagtggcaaactcggctcactgcaacctccgtctcctgggttcaagcaattctcctgcctcagcctcccaagcagctgggactacaggtgcacaccgccacatccagctaatttcttttgtattttagtagagacggggtttcaccatgttgcccaggctggtctcaaactcctcagcccaggcaatcaccagcctcagcctcccaaagtgctaggattacaggcgtgagccaccgccgccagacatataccttatttttaactaaattgggatgaaaatcaaaataataccctctgtctgtagcttgctgcaattctaacttggataattgccctctaaacatccatagttcttttggatttgtcaactgggaaatcactgtggatttggctagatatcaccctgttcatcggaaaaacctgagatggtttgcactatgcagatgactgttacctttctccaaactgggaagaactccatggttttctgattacaatttgtgtcattcagtctccagtaaatgcaaaattataatgtcaaatagatgagatcaatggaatagaattgaaatcccagaaataaactcatatatatatatacatacatatatatatatacatacatatatatatatatgtatatatatatatatatatactcaaatgactttcaaaatgctgccaagaatatgcaaagactattgttttcataaattggtgctgagacaactggatagccacatgcaaaagaatgaagttggacccctacatcacccaatatatggtaattcactgaaatagatcacagaccaaaacataagaggtgaaattataataatcctaggaaaaaaaggtgggaaatattgataatcttggatctggcaaagaattcttacatatgcaggccgggtgcagtgtctcatgcttgttttcccagcactctgggaggccgagggggccggacagcctgtggtcaggagtttgagaccagtctggccaacgtggtgaaaccccatctgtactaaaaatacaaaaaattagcctggcatagtggtgcatgcctgtaatcccagctactcaggaggctgaggcaggagaaacacttgaacccgggggggtggaggttgcagtgaactgagatcatgccacttcactctagcccggatgacagagtgagactccatctcaaaaaataaaaaagaatccttacatatgcagccaagtgtggtggctcatgcgtgtaatcccagtactttgggaggccaaagtgggaagatcacttgaggtcaggagtttgagaccagcctgggccacatagtgagaccctcgtctctattcaaaaaacaaaaggaaaaaagaattcttacatatgacagcaaaagcaaaaattgatgtgtgtgtgcaatagaatacacacacacacatatatatacacacacacacataatttgggcctcataaaagtaatagcttttgtgcttcatagaacactatcaatatgttgaaccaaccctgcacccctgggataaatcccacttggtcacgatgcattacatttttaatgtgttgttgaatttgcaaatattataatcctatatctggaaaaaactaaagactccaccaaccagcactttgggaggccgaggcaggtggatcacgaggtcaggagtttgagaccagcctggccaatatggtgaaaccctgtctctaccaaaaatacaaaaattagctggtcatggtggcatgcacctgtactcccagctactcaggaggctgaggcagaagaatcgcttgaacccaggaggtgaggttgcagtgagctgagatcgtaccactgcacttcagcctgggcgacagagtgagactctgtctcaaaaaaaaaaaaaaaaaaaaagactccaccgaaaaactattagaaatgataacccaattcagtaaagttccaggatacaaaatcaacatacaaaaatcagtagcatttctatatgccaacagcaaacaatctaaaaaagaagtcaataaagtaatcccatttataatagctacaattaaatacctaggaattaacttacccaaagaagtgaacaatacctacaatgaaaactataagacattgatgcaagaaattgaagaggacaaaaaaatgaaaagatactcatgttcatgcattggaagaatcactattttttttttttttttttttttgagacggagtcttgctctgtcgcccaggctggagtgcagtggcgcgatctcggctcactgcaggctctgccccccggggttcacgccattctcctgcctcagcctcccaagtagctgggaccacaggcgcccgccacctcgcccggctaattttttgtatttttagtagagacggggtttcaccgtgttagccaggatggtctcgatctcctgacctcgtgatccgcccgcttcggcctcccaaagtgctgggattataggcgagtcaccgcgcccggcctagaatcactattgttaaaatgtccatactaaccaaagaaatctagagatttaatgcaatcccaatcaagataccaatgacactcttcacacaaatagaaaaaaacatcctaagatgtatatggaaccaaagaagacccagaatagccaaagctatcctaagcaaaaagtacaaaactggaggaatcatattacctgactttaaattatttaaatatgactataaatcatattatctaactttagagctacagtaaccataatggcatggtagtggaataaaaacagacacaaagatcagtggaactgaatagagacgccagagataaatccatacatctatggtgaactcatttttgacaaaggtgccaagaacatacattgggaaaaggacagtctcttcgataaagagactgggaaaactggataaccatatgcaaaataatgaaacagacctctctctctcaccatatacaaaaatcaaatcaaaatcagttaaagactcaaatctaagaccttaaactatgaaactactaaaagaaaatatagggaaattctccagaacattggagtgggcaaagatttcttgagtaataccctacaagcacaggcaaccaaagcaaaaatagataaaggggtcacattaagtaaagagcttctgtacaacaaagtgaaaagacaagctacagaatgggagaaaatatttgcagactacccatctgacaaggaattaataaccagaatatagaccgggcgcagtggctcacgcctgtaatcccagcactttgataggccgaggcgggcggatcacgtggtcaggagtttgagaccagcctgaccaacatggagaaaccccatctctactaaaaatacaaaattagcggggcatgatggcacatgcctgcaattccagctactggggaggctgaagcaggagaattgcttgaacccgcgaggcggaggttgcggtgagctgagatcgcaccattgcactacagcctgggcaacaagagcaaaactccatctcaaaaaaacagaaacaaaaacaaaataaaaaaaaaccccagaatatataaggagctccaaaaaaatctatagaaaaaatctaataggccgggcgcagtggctcacgcctgtaatcccaagcactttgggaggccaagacaggcggatcacgaggtcaggggatcgagaccatcctggctaacacggtgaaaccccgtctcttctaaaaatacaaaaaaaaaaaaaattagctgggcgtggtggcgggtgcctgtagtcccagctactcaggaggctgaggcaggagaatggcgtgaacccaggaggcagagcttgcagtgagccaagatcacaccactgcactccagcctgggcgacagagcgagactccgtctcaaaaaaaaaaaaaaaaaaaaaaaaaaaaaaaaaaatctaataatcggattaaaaataggcaaaaaatctgaaaagacatttctcaaaagaaggcatgcaaatggcaaaccgttatatgaaaaggccaacatcactgatcatcagagaaatgcaaatcaaaactattatacaatgagatatcatctcacccctgttaaaatggcttttatccaaaagtcaggcagtaacaaatgctggagaggatgtggagaaaagggaacctttgtacactgttggtgggaatgtaaattagtacaaccactatagagaacagtttggaggttccacacacacaaaaaaaataaaaatagagctgccatttgatccagcaaccccacttttaggtaaataccccaaagaaaggaaatccatgtattgaagagagatatctgcactcctatgtttattgcagcattattcacaatccccaagatttagaagcaacctaactgtccctcaacagatgaatggattaaaaaaaaaatgttccaaatacacaatggagtactattcagccataaaaaagaatgagatcctgtcatttgcaacaatttggatggaattagaggtcattatgttaagcgaaataagccaggcacagaaagacaaacttcacatgttctcacttatttttgggagcaaaaaattaaaacaattgacctcatggagatagagagtagaaggatggttaccagaggctggaaagggtagtgcgggggttgggggaaggggaagtgaagatggttaatggccacaaaaaatagaatgaatgagacctagtatttgctagcataacagggtgattatagtaaaaaataatttggttgcacatttttaaataactaaaagagtataatcggcttgtttgtaacacaaaggataaatgcttgagttgatggattccccatttaccatgatgtgattattaggcattgcatgcttacatcaaaatatctcatgtaactcataaatatatacacctactatgtacccacaacaaaacttaaaattaaaaatgtaaacattgcctggtctctgtgaacctacggggtcacagttctgagtgtcctggcagcatgatgccaagccactgtcctctggagaatatctgactctcctgatccagtatggccttgcctccagggcccttttgctgtggatttactcctcaaagagtcagtcatcaaggggttcgctttatctggaaactcttgtctggcattccctgcgcgcacacctatgtccccgttcagaagcttcttcggtaaacgccagtgtccggtctgagggcctttatatctagcatataaagttctggtataatgcaaatgtctctggcaggacagtttcagggacaaaagtggaagctggatcgctcagctacctgacctccgtctgagatgtgactcaggcaacagggggtggaacctcacaaactgtccaattggagacgccgccggagcggtgggtggggccgccctgtacaaaggcgcgtggatacggtggcgcgatttccagtttgtgtctctcctgcctcgaacgtcgctaggtggctctgccgcagcctctgtcgctctgggacccgcactggcagagggagtcgtagttagggggtggggacaccgcggaagcccggaaatggtgactgtgcggggcctggaatcccgagacctgaagagctgctggccggaaccggctgtcgcgggaaccgggcctgcccgcggccactcctgggtctgtgaacccgagtccccctggcgtagctcggccctcggcctcctcccgccgcagagtgaagctgggccggcagccaggatcccgggagtcctgtcctgtccccgcgcggctactgaggcccgggtcccggagccctgtgtgggcagctccatgcccgtagccccgcgtcttccaagattgtgtggggatcacgggagggtcataggagagaaggaatcccggctcgagtgtggcgttcgtgcgtgggaggagcggtggtccgtggggtccccagtctcttctttttccccagggggaccggtttgccccttaattttacaaacgtgtgaaaacaggatctcaaatccacgaccccgttttccagcctagctcttcctaggactgacaggaaatccctaaatttgccaattccttctttcattccaaatgaagctttccctctccaattcataatattattatttgccctgttaaatacaatttgtaggaagccattggtttagactgagctcctgcactagacccaacagaccaaaccaaaatgagttacccacggggacgttcctcgctaccaagctgaaactaagttgtttatctgaccttacaaattatcaggagagaaagagatgctggtcaaatccccaacaggccagttttagccaacatgataaagaaagtcccctctgctttaacttttaccagaaaagcaactttgaaagttcccgtctttcaactgggcgtgatggctcacgcctgtaatcccagcactttgggaggccgaggtgggtggatcatttgaggtcaggagttcgagaccagcctggcgaacatggtgaaaccctcgtctctactaaaaatacaaaaattagctgcatgatggcctgtgcttgtagtcccagctactcagggggctgaggtgggaggctcacttaagcccaagccctggaggtcgaggctgcggtgagctatgatctcgccactgcgctacagcctgggtgacagagggagaccctgtctcaaaaaaataaacatcaatagcggttgaaagccccatgactggggagcagcagccagagactagtgacttcaagctaagaccactcttgagcctgcaaagggaggtcattgaaagcccagatgggtcttcctggggagccttccccaaaagtgtcctacttgctctcacccaccaaggaaagagctctttatacagagagaagctacagagcactggaatgctgggaaccgcacgcggttttaggagaaccgggagggttttaattgtctaggttgtaattgtagtttccttgggtctacttttagacattaggtttgagttttgctttcacattagggtacactcgtggtgtaatttttccatattgaaaaagtctgtgaaagttacaagttctgtctcctggacatggtgttaatgactttgggagttcatttgtgtcagaaccttcatctgaatccagctgacagtttcgtcacttacgagaaccagtgggaaggggcattctctgctcccggagttcattcctgtggctgctcaggtgtccctgctgtcaccagggactattccactctagggactataccctaacagggagagagtgtggactccaagctttggtatgtgtttaaccttctggatgttggtttttcttctgaattgcggagaagcaggctgcttatctgagctgattcaatgtttgtgtttctttcctttggattcctttttctattgaatattgcagcactttaactccagtttcctttaacattttgtaattttattccctgtatgagtctgtaggatttttagtttgttggtctttgaaaatttaagttgattgagaaatatgatgtaagagaagcaaatcctggaaccaaatagaatttttattcctttcaggcaaaagaagctcatggtgtgagatggatatgtttaacttctcaggtgcatttttatttttacattagtttgtgtgtgtgcatatccctagaaaactttcaaacttcaaaggctctactattcccagggcaaatggattcctgttttaattgatacgaggaaaactactcctcaaagcttgtgtaatctttgaaaaattctactacatttaatggttatatccaaaccctaatgtattataatatgctactctttttttgagactgagtcttgctctgttgcccaggctggagtgcagtggcgccatctcggctcactgcaagctccacctcccgggttcacgccattctcctgcctcagcctcccgagtagctgggactacaggtgcccatcaccacgcctggctaatttttttgtatttttagtagagctggggtttcaccatgttagccaggatggtctcgatctcctgacctcgcgatccgcccgcctcggcctcccaaagtgctgggattacaggcgtgagccaccgcgcccaatctataatatgctactctttcctgaaaatacccctcagtgtgagatacagtggacagacatgctatgatgcagattctcttaagatttgaaattttacatttcgtatagtttacacttttaaaagtgtataaaggattaaatcttaatgaagacaacttaaaatttaaaaaaaactacattatttaaagactttaatagtaaaatatagtgcagataaatatcttcgttcattttatttttttattttttattttttttgagacggagttttactcttgttgcccaggctggagtgcaatggcacaatcttggctcacagcaacctccacctcccaggttcaagtgattctcctgcctcagcctcccgagtagctgggattacaggcatgtgccaccatgcccagctaatctttttgtatttttagtagagatggggtttctccatgttggtcaggctggtctcgaactcctgacctcaggtgatctgcctgcctcggcctcccaaagtgctgggattacaggcgtgagccaccgtgcccggcctttttaatgtatatttttagacagggtcttgctctgtcacccaggatggagtacagtggcacgatcgatcatagctcactgcagcctcagcctcccctgctcaagtgatcctcccaactcagcctcctgagtagctggaactacaggcacataccaccatgcctggctaatttttgtattttttgtagaggcagggtttcaccaaccggcagggttgcccgggctggtcttgaactcttgagttcaagtgatcctcctagctcggcctcccaaagtgctgggattacaagtgtgagccactgcaccaggcctccattcattttagagagataatacatgtgaaggttaaaaaaaaaaatctatgagacaggaaaatctaacataagactcactgtcaagcatatcctggttcattccaggattcttgctccagccaccccgcccttcgtaaaaacttttggtaattccttgtgcatcctattagtgtttctttattaaaacaagcaattgcaggccaggcgcggtggctcacacctgtattcccagcactttgggaggccgaggcaggcggattacctgaggtctggagttcgagaccagcctgaccaacatggagaacccttgtctctactaaaaatacaaaattagctgagcgtggtggcgggtgcctgtagtcccagctactcaggaggcgggcgcctgtagtcccagctactcgggaggctgaggcaggagaatcactagaacccaggagactgaggttgtggtaagctgagattacgctattgcactccagcctgggcaacaagagtgaaactccgtctcacacaacaacaacaacaaaaacaagcaattgcaaatgcatgtttttcttatccatgtttgctcttgtaatgagtagttggactccaccctttctggtatttgactgttggcagattcagtgtcaacccccctcttctttctaacagctgcccactgtcaatggaatcaccaaactctcaaatattttaaggctttattctgagtcagtatgagtgaccacggcccagaaaacgcagtctcaagaagtcctgagaaagtgcaccagtggcagccaggttacagttatttggtatttttgagacagggtctcactctgtcgcccaggctggagtgcagtggcacaatctcagctcactgcaacctcagcctcccaggttcaagcaattgttgtgcctcagcctcctaagtagctgggattacaggcctgcgtcaccatgcctggctaaattttttgtatttttagtagagatggggttttgccctgttggccaggctggtcttgaactcctggcctcaagtgatctgctggcctcagccttccaaagtgctgggattacaggcacgagccacagcacccagctacagtttggttttatgcattttagaaagacaggagttgcaggcagacataaatcagtacatggaaggtaggcattgatttggcctgaaaaggtagaatatcttgaagcgggggcttacaggttataggtagactcagaggttctttgatttacagttggctaaaggagtaaacatttggagtcattagataagaatgaatgtttgggccgggcgcggtggcttatgcctgtaatcgcagcactatgggaggccgaggcgggtggatcacctgaggtcaggagttcgagaccagcctggccaacatggagaaaccctgtctctactaaaaatataaaattagccaagcgtggtggtggcgcctgtaatcccagctactcgggaagctgaggcaggagaatcacttgaacctgggaggcggaggttgtggtgagatcatgccatcgcactccagcctgggcaataagagcgaaactttgtctcaaaaaaaaaaaaggaatgtttaaggaagacagctgggctcaggagcctataatcccagcactttgggaggctgtggcacacagattgcattaggctggggacagtggcttatgcctgtaatcccaacactctgggagcccaaggcaggtggattacttgaggccaggagttcaagaccatcctggccaacatggtgaaaccctgtctctactaaaaatacaaaaattagctaggtgtggtgtgtgtgcctgtggtcccaactatttgggaggctgaggcagaagaatcccttgagcccgggaggtggaggttgcagtaagctgagattgcgccactgcactccagcctgggtgacagaacgagactccatctaaaaaaaaaagtaaaaatgaggtcgggcgcagcagctcacgcctgtaatcccagcacgttgggaggccgaggagggcggatcatgaggtcaggagatcgagaccatcctggctaacacggtgaaaccccgtctctactaaaaatacaaaaaattagctggacgtggtggcgggcgcctgtagtcccagctacgcaggaggctgaggcaggagaatggcgtaaacctgggaggtggagcttgcagtgagccaagactgcaccactgcactctagcctgggcgacagagtgagactccatctcaaaaaaaaaaaaaaaaaaaaaaagtaaaaacgattagctgggtgtggcagcatatgcctatattccccactacatggatcacttgagcctgggaggtccaagctgtggtgagcagtgattatgtcactgtactccagcctgggtgacaaagcaagagaccctgtctcaaaaaaaaaaaaaaaaagataagaaaatctgttaaccaatacactgggtcggaatgacctagagtttgtgacttaacccttggagagcatggccttaggtcttatttataatttggtatcttattgtcataaagagttttgttagttttatggtctctattttaacattaatgctggtcagttgtgcctaaactccaaaagggaggggttataacagggtgtgtccgacctcccttcccatggctgggaattcagtttttattgtttttgttctttcaagacagggtctcactctgttaaccaggctggagtgcagtggcacagtcatattatagcttattgcagccttgaactcctgggctcaagctatcctcctacctcagcctcctgagtagctgggactacaggtgcatgccaccatgcccagttaatttttactttctttgtggagatggggtctcactgtgttgcccaggctgttctcaaactcctggcctcaagccatcctcagtcccaaaatgctgggattacaggtgtgagccactgcgcctggcctgggaattcagtgtttagggttgttatggggttcccttggccaagaaggggtctgttcagtcaggagggtgctttggattttattttttgtttacaatacctggacaagctgagaaagctgaggcgttccctccttgggccttgctggagagtcccacctaagaagcttttcccctcgaggggaaatgaactctcctactgccccacccccaatcacagtaaacacccagtccaggctcctttccttactctctcaagccattttgcctgcttgaggggcctggcctgcttttctcagagacctcaatcatcttagtaattaaaccttttcataccctctcagcatgtgtgcaccataaccacactggcatcgctgtcaacattggaactgcacctctggggtgaccatggcaactggtgccgtgcacaggatgcctagacttttatcaccttatcagtctgtgttctcttgttggaattactaactcgctctgccaggtggtggctggcatgtggggtgagcgctgctggctggaggagctggtgctctgagtgtgctgctctgtgttgcatggtgagccctgccgggcctgggttctacattccgctgacttgagttggcagtttggatagttccttggcatttgggagcaggagtttgggattgaatccctcctgaaagctctcctgagtgcatgtcttggccaggacctatctgtgtatttagattgaaccaatacttcctttcacaagcaaccacatctacaattctaatcatagctgttattatcaatataatgtactctggacaatgaaaaccacaaaaatactaacccaagcagcattcctaacagttaccatagctcttgtgataaaattaggaatagccccttctacttcgttttttttctttttgacatggaatcttcctctgttgcccaggctggagtgcagtggcatggagcgatcttggctcactgcaacctctgcctccgggttcaagcgattctcctgtctctgcctcccaagtagctgggattacaggagcctgacaccacgtccagctaatttttgtatttttagtagagacagggtttcaccatgttggccaggctggtctggaactcctaacctcaagtgatctgccagcctcagcatcccaaagtgctgggaatacaggcgtgaaccactgcgccctgtgccccgttctatttctgaatcccagaagtaacacaagggatctcattaacatcaggtataaataatcctccttacataacaaaaactagcaccagtctccatcatatttcaagtctacccttaatagacctaaatatgctactggcaattgcagcactatctgtcccgaagagggctgaggccgacttaaccaaacacaactccgaaatatcttggcctactcatcagttgctcctataggctgaataatcacaattttagcctacaacccttctatcacaatcctaaatctatggatttacataaccctaacaattacagtatttatattatttaatctaagtacaagtactataacattatcactacattatatatgaaataagttaccactactacttccacaattcttatcaattttccctactgggactaaccccccttacaggatttatacccaaaggagttatcattcaagaattaacaacaaaatagccttattatacccacacatagagctgtcacagcgctatttaatcaatgtttctacatacgcctaatttactccacatcactagtgatattcccaacaactaataacataaaaataaaatgacaatttgaaaatataaggccaggtgtggtggctcacacctctaatcccaacactttaggacgctgaagcaggaggactgcttgagcccgggagtttgagaccagtctgggcaacagagaccccatctctacaaaaaattaaaaaattagccaagtgtggtggaatggtcctgtagtcccagctactcaggaagccacaccactgcactccagcctgggaaacagagcgagaccctgtcacaaaaaaaaaaaaaaaaaaaaaaaaaagaagaagaaactataaagcaagccctctttttatcaccactcattactgtatggaccctattcctaccactcttactctcaccaatactttctcttttttgttttttttcttttttgagatgaagtcttgctcagttacccaggctggagtgcaggggtgtgacctcggttcactgtaacctctgcctcccagattcaagtgatcttccctcctcagcctctcgagtagctgggattgcaggcatgtgccaccatgcctggctaatttttgtatttttagtagagatggggtttcaccatgttggcagggctaagctcgaactcccgacctcaagtgatctgcccgcctcagcctcccaaagtgctgagattataggcatgagccactatgcctggccctcaccaatactttcaacaataaactagaaatttaggttaaattaggctgggcacagtggctcacgcctgtaatcccaacactttgggaggccaaggcgggcagatcacttgaggtcaggagttcgtgaccagcctggccaacatgacaaaaccccatctctacaaaaaatacaaaaattagccaggcatggtggcacacacctacagtcccagctactcaggaggctgaggcgggaggatcagatctacatctaccaccataattattgccatccctgcagatagtaaggtctttagttgactaacaacagtacctggaggcaatattaaatgatccgctgccatactctgagcactaggcttcattttccaattcacagtgggaggtttaactggaatcatactatcgctagatatcattccacatgatacatattatgttgtaatacatttccattatgtcctgtcagtaggatctactgctatagatgcccaagaagtagaggcagtatgaactattctacctattatctttattttaattgctcttccatcgttatatattctgtatacaacatgaaattaataacccctccctaaccatagaaactatagatgatactggccaggcgcggtggctcatgcctgtaatcccagcactttgggaggccgaggtgtgcggatcacctgaggtcgggagttcgagaccagcctggccaacgtggtgaaaccccatctctattaaaaatacaaaaaattagccgggcgtagtggcagggcctgtaattctagctacttgggaggctgaggcaggagaatcgcttgaacccaggaggcggaagttgcagtgagccgagattgttccattgcactctagcctgggcgacagagtaagagtctgtcccaacaacaacaacaacaacaaaaaggccgggcgtggtggctcacgcctgtaatcccagcactttgggaggccgaggcgggtggatcatgagatcaggagatcgagaccatcctggctaacacagtgaaaccccgtctctactaaatatacaaaaaattagcgaggcgtggtggtgggtgcctgtagtcccagctactcgggaggctgaggcaggagaatggcgtgaacctgggaggcggagcttgcagtgagccgagatcgtgccactgcattccagccttggcaacagagtgagactctgtcttgaaaaaatatatgtatatatatagatgatactgaagctatgaatatacaaagtatgaagacctaaattttgactcctacagatttcctacaacagacttaaaaccaggagagctgcagctacttgaatttgacaatcaagtagccttccccgtagaaacatcaattcaaatattaagttcgtcgaaagacatcctacgttcatgaaccttaccatcattaggcctaaacagatgcaatgccaggatgtttaaaccaagcaatcctgacatttacacaatcaggcctttctacagtcagtgctcggaaatctgtggatctaatcatagcttcatacccattgttcttgaacttgtttagtacccctaaaacacttcgaaactggtcagcatctatattataatatcactgtagagctaatcagtactaaccttttaagttaaagactgagttatgatctttccacaacgaagtgccccaactagacacatccacacgatttattactatcatatccataatcctatcaccatttcaattaaaaatttcaaaattcatctacccaacaaactcaacactaaaagcttttgaaatatagaaacatgaaaccccttaagaaataaaatgaacatctctttcattaccccaacaatagtagaactgcctgtagttattctttttttctttttttttgaggctgagtcttgctcttgttgcccaggctggagtgcaatgtcgtgatctcaacttactgcaacctctgcccttcgggtgcctcagcctcccgagtaactgggattacaggcacccaccactacactcggctaattttttgtatcttttagtaaagacgggatttcaccatgttggccaggctggactagaactcctgacttcaggtgatccacctgccttggcctcccaaagtgctgggattacaggcatgagtcaccacgcccagacttcctgtagttattctaattatcctgtttccaaatatttccatcacctagccatctgattaacaactggctaatttctgcccagacgcgttggctcacgcctgtaatcccagcactttgggaggccgaggcaggtggatcatgaggtcaggagttcaagaccagcctggccaagatggtgaaaccccatctctactaaaaatacaaaaattacagcgtgcctgtaatcccagctactcgggaggctgaggcaggagaatcgcttgaacctggggggtggaggttgcaatgagccgagatcgcgccactgcactccagcctgggtgacagagcgagactccatctcaaaaaaaaaaaaaaaagaaaaaaaagaaaaaaaaaaaaactggctaatttctatacaatagtgactattaataattcaacttatactaaaataaattatgataatacataatatcaaaggacaaatctgatccccttgtttttttgttgttgtttttgtttttgtttttttgagatggagtcttgctctgtcgctcaggctggagtgcagtggcatgatctcggctcatcgcaacctctgcctccagggttcaagaggttctcctgcttcagcctcctgagtacctgggattacaggtttgcaccaccacacctggctaatttttatatttttagtaaagacagggtttcaccatgttggtcaggctggtctcaaactcctgaccttgtgatccgcccgcctcagcctcccaaagtgctgggattacaggtgtgagccactgcgcccggcccccacccccggtttttgtttttttttttgagacagagtcttgctctgtcacccaggctggagtgcagttgcatcaccatggctcactgcagcctcaacctcaaggcatctgcccacctcagcctcccagagtgctgggattacaggtgtgagccaccatgcccagccgaacctgctcccttatactaatttcactgatcttcttgtttcaacaaatttactagggctcttacctcactcattcacaccaactactcaactgtcaataaacttaggtatggctattccactatgagcaggagcagtaattactggcttgcaccacaaaacaaaagcatccctagcccattttctaccacagaaaacacctattttacttattgccgtactactaattatagaaaccaccagcctcttcattcaaccaatagccttagctgtgtgactaacagccagtattacagctggccctctgcttgttcatttaattggaggcgccacacagtattaacatcaatcaacctacccacagcctcagtcagatttacatcttgattatattaaccatttttgaattcgtcatagctttaatccaagcatatgtttttacactactagtgagcctctatctacaagacaatacttaatgacccagcaaacccatgcgtaccatctagtaaatcctagcccttggccattaacaggggctctcttagcactaataacatccactacccagacttagtggttggatggcaagcatgtggtctttggcaaggtgaaagaaggcatgaatattgtggaggccgtggagtgttttgggtccaagaatggcaagaccagcaaaaagatcaccattgctcactgtggacaactctaataagtttggcttgtgttttatcttaaccacccaccagaccattccttctgtagctcaggaaagaacccctccactccatttgcttgcagtatcctagaatctttgtgctcttgctacagttccctttaggttccatgttttccttattcccttccatgcctagctggattgcagagttaaatttatgattatgaaataaaaactaaataacaaaaaaaggtaaagaaagaatacgataaacatggaaacaaattaaacataaaaaatgcctgaaaaccatttcatggaagataaaagaccacataggaaaaatgttcaacagcaatggtaaccagtaaaaagcaacatataattacacagagactgtgtttaacactcaaggagcacaaataaataagttagataattccaagcattggcaaattgcaaggaataaacacacatgcatgagtggtcaaatggttaattgatatactccatcagtatttcctactaaatatgaatttatccataatatacaactcagtaattttttcccaatatgtaaaaaatttataatttagcacttggagacataaataagaatgacattgtcaccaggatcaaaaaataaacttgaaacaacattagtccacaagcaatagaatgaagcctcagacagtaatgtatgtgcaacagactgaggcaaaaaaaccacaaaaaaaaactttcagcataacattaattgtaatagtaatactaacttgctgaaaactcaaaatagccaaaactctactttatggtaaatagatggtaaatctataaagaataacaacaacaacaaatcaccatcatggtcacctctgggtgcagaagggaggtgagatcagggtgacataccagtgctgccaacagcctatttagctgggtggtgagtccgtgggtgtttatgttataatttctttttttttttttttgagacggagtctcgctctgtcacccaggctggagtgcagtggtgcgatctcggctcactgcaacctctgcctcccaggttcaagcgattctcatgtctcagactcccgagtagctgggattacaggcgcccaccaccacgcccagctaattttctgtatttttagtaaagacggggtttctctatgttggccaggctggtctcaaactcctgacctcgtgatccaccagcctcagcctcccaaagtgctgggattacaggcgtgagccactgcacctggcctatattattatttaaactaagcataagtattttatttccagaattctctttgcttcttcagaccttatgactcaatccaaccagattgtcaaccaagacaataaaactcttacactcaaatcatggaataaaattcttgaatgcttcagcaaactataattatatggcagcaatattctgtaaagaaaatgagtgtgaagctgctctgcccgagtggctcagaactccaagagatatacctgattggggcaaggcccccaaaaagactttagctcaaagatcaatctcttgcttactccctacaaggagtgtgcacattccttacagcttccaccttttttcttttttttttttttttgagacggagtctcgctctgttgcccaggctggagtgcagtggcacgatctcggctcactgcaagctccacctcccaggttcacaccattctcctacctcagcctccctagtagctgcgaccacaggcgcccgccaccacacctggctaattttttgtatttttagtagagacggggtttcaccgtgttagccaggatggtctcgatctcctgacctctgacctcatgatccacccgcctcagcctcccaaagtgctgggattacaggcgtgagccaccacgcccggcctttttttttttttttttttttttagacagagttttgctattgttgcccaggctggattgcaatggtgcaatcttggctcacagcaacctccatccgcctcccaggttcaagcgattctcctgcctcagcctccccagtagctgggactacaggtgcctgccaccatgtcctgctaattttttgtatttttagtagagatggggtttcatcatgttggccaggttagtctcaaactcctgacctcaggtgatccacctgcctcggcctcccaaagtgctgggattacacgcatgagccaccacgcccggccgcaaataaactcttaaattcataaaccttttctttagcagacagaacccaaaggtgtctgactcttacagatgttctcattttgcacaaattacactctgactaaatcaactctgcggatggaaaaccaaactgctgaccatgttgaattttaccttagttctgtaggtaacggaaaccccaccactaccaccatcttctgtgatctagagaagcaggctactacaaaataacacccttcccattacaacttagatgatgtccctgtctacctatgtataaggccagacacacactctccaaattcccattctttgcctcatgaacaattagctgaacagttttatcttcactgatcagttgaaacaaaataccagtgaacccacactttggttaagtttctttctttcttccaggcccctgaacttccacccaccttcagtagcctgagcaagcacccaaccccacctttatgacccctcctaagaacaggctgaccttaggatcaaatattctctaatctagcatctgattttgctcccctccatcctgccctctctctctctcactttattactaatctagcttgctcctccctatgaaagaaaactttacctaacctttgagatgctttcaaatattatacttggtgctttcctcctatcactacaatacttcattcaaataaggtcactacttacctaaatctggattttacttgagggtgtctagaaacagccccagggcaataacaactacaaccacagaaggggcaacagatcccacccccaaccgcatctgcctatggatcccctaggaaacctgcagcatagtctcgccaggaagaactaaatgggccttcggtgacctccccttacaggctcaagattggccttagcttggagtcactggcctaaggcctctgctctccactgaagggtactcattttttttctctattcgacaagcttttattggggtatctactatgtgccaggtaccagtctaagtattggggaacaaagactaataagctcccagccaggtgcagtggctcacgcctgtaatcccagcactttgagaggccgaggcggatggggagttccagaccagcctgaccaacatgaaggaaactccatctctaccagagtcaaaaaattctggtatcaaatcctggatttgccacttattagctctgggactgtgagctaatgattaattctttctttctttttttttttttttgagatggagtttcactcttgttgcccaggctggaatgcaatggcgcgttcttggctcactgcaacctccactgcctgggttcaagcgattctcctgcctcagcctcccaagtagctgggattacaggcatgcgccaccggacacctggctaattttttatttttagtagagatgggggtttctccatgttggtcaggctggtctcaaactcccgacttcaggtgatcctcccgcctcggcctcccaaagtgctgggattacaggcgtgagccaccgcggctggctgaacaaacctcttcaaggtgacgaacccagggagaggtagtgctgacttagaacacagaaatgtctgactcaagtgtcaggtcaggtcatcctgtcacatgggacaccccctcaccctcaatgaagtgctcaatgatcaccatcccaagataagacaatgcattgtacacccccgtgtacccaaaatggcatttcgcttttcagttttcttgcactgccatgactgcgtgggttttttcttgtccttcggtatagtttttctcccttctgtagtctgagagaatccagaaggcaagaatcaatacccctcaataccagcatctgattgggtgacccccagtatccccaaaggaatggaaactggggttggcgaagaaaagctgagtgccccaggggttggctatttatttgagggggataccaggagactctttccagccgagggtatccagctgctcccctgagaggccccaaacctatctctgagaagataaccgaggagctcataattcactagatcctgcaagagacttggcagctgagggcatcttgggtctgccccaggcagttctgaaatctaagaccagggaaggatagagggtgggctaaggacacatcacggcgtaaagtttccaaaaaggaacctcaacccaaagacattctgataaggtgtctgtgcctagggaagatgaaaggagaggcacaaagtatttttacggtagagcgccaggtgcttactctctgctttcctctcagaggaaaagtccacaaagagaaaacaaatctcttaaaaaaagccatccattgctttgtagggaaaaatgaataaacaattctaatactatgtttgttggaaatgtagaatgaaggacaaaaagctgataaagttggctgggtgtggtggctcacgcctgtaatcccagcactttgtgaggccgaggtgggcagatcatgaggtgaagagatggacaccaacccggccaacatgatgaaaccgagtctctactaaaaatacaaaaaattagctgggcgtggtggtgcgcgcctgtaattccagcttcttgggaagctgaggcaggagaatcgcttgaacccaggaggcggaggttgcagtgagctgagattgcaccactgcactccagcctggtgacagagcgagactccgtctcaaaaaaaaaaaaaaaaagccatccacatccattgctttgtaaccaacaagcaattctaatactgtgtttgttggaaatgtagaatgacggacaaaaacctgataaagttgtgaactggaggaaagctggcctttggaaatgcagggaggaatttattcccagcccctgtatgagggccgaggtcgtgtctttgggaccctgcttcccatacatttagaagacctgtagagaaaccagtatccccgggaaagatgagggactgaggatcccacagaccacagctcctcccacactaaccccacaaccgaggcgggattccccccatgaccctcccgtgaccccgcacaatctggagaaacgcggggctgcggtcgccacggacggacgcgataggacgcccggggtcccggctgccggcccagacccaccccgcggcagaggggaccgagggacgagctgcgccaggaggactcaagtcccagatcccgaagtcgccgcggggaggcccgggtccctccacagctggatcctgctggattccaaccagcccctcctccaagtctagggactccaagccccgcacacgcaccgtatcccgggttccaggtgtcctggcttccttactacgcctcctttggtcagagctggtcacagcagacagggactgcagcggcgccacctgtggcgtcctctgcagaaaggacctgccccgctgacctgttgaccgttgcccaggcatcctggcggcacaccccattggactgttcagagctcgccccagcgcccccgattgggtagattcgggctccaccccctgcgtcacagaagtcatctaataggtggctgcagggataggctgtaaccgcagccaatagcaggcccagcttcctccaggcaaccaaatcaggctccgctggaggcatcaacacaattgtccacaggctttccagagctactactactggcctcttcctgtactcggtgggccctttctccctcttccaggtcacagatgagcagaaggaattccagactcagtgtccaatggagacatctccttccctcaaagcaaaaggaagccgagtccaaaccaggccacactggaacagcagggagggcctgatgtcctccagagatcaggaatttgggatggggcagttggtgccatggccaagccattttctcaccttatctcttagtctactcattttcagcccagaaaaaaaaacaacaacaacaaaaaccatgccaacgtgggaataaaattaataaaggcatggaaaaattattaaatgcatagttatatggcagcattattccataaaggaatcaaaaggaaagcaaacatttgaactagctcaggcaagcaggcttcacccacagttcacaaggaacacctgcattcaggtttaacatattcttaatcttgggagtcagactcttgactactgaaatggatgcccaggtcgatcagaccctcctgatgaggtagggaaacctaaggatttaactctgggagctcaacatgcccttatgtaccctccacacagtgtggaaaagctgcctccttcaagaccttcatttacacctgcaggagactcttacctggagtcagtttaacattctaacctacataaactatcagctacataaatcctttctccaaaatgagtctttatctgagcctgaccatgccagatttacttcacatatacaaattacagttggaccacaatgaccctatgtatgccaaaacaaacacattgcccagaaaatagttagcctgagaaaggacagaacaccccaagcatgtcttcacatgaatcttttgctttccagggctctgcttctcagaatctgcactcctgtagctgttctgagcaaccagaggccacctacggagacaacaggctgcccagaaagccacatgaggagctccatttccctccctttgcaggctccagactggcctcaggttggagtcactggctgcaggcgctgctgcccactgcaggttcttcacctgcttctcaccagcactgatcagctacatgagacaaagactctctatcgtactgtatgagaaagaaaccagcaaagtcctacgtttcctcctgtgtttacatacaaatcagaggaagaaaatcttaaaatattttatatggattaaaacactggagtgggcgtaagtaatggcttgtgcctgtaatcccagcactttgggaggctgcagtgggaggatcgcttgagcccaggaattcaagaccagcttgggcagcatagattttcacctctagaaaaaaatttaaaaacttagcagtgcatggtgatgcgcatccatggtcccagctactcaggaggctgaggcaggaggatcacttgagcctaagaggtcagcactgcagcgagccaagattgtgccactgcactccagcctgggcaacagagttagactctgtctctaaaaagatttaaataaatatattttaaaattggcaaataagcattccttttagaaaacaaagatgctagcgaactattattttcacattaacacttatgaaaagaactaatcaaatgtgagctcttcccttttttctctgtttcagtggccacctgaccttcacagtacatggttgtcaccaggtgctctgtggctggggatgttcatgtccagtttatccatctgaatctctctcaaccccaccccaccaccattgacccacccaattatttctgtagctaaacattaagcattgtataaataactgtccctttcaaagaggactcaggttgaatacacctgtgattctctcagatcctctgatataatcatttgcatttgtcttccaggatagactgtgatatcttgagtaggaacctcattcattgtatttgcttctgttcccccaaacctgtgtcaccacctgatcattgaggacacagaaaatttattttatttatttttttgagatggagtctcacttttttttttgagatggagtcacccaggctggagtgcagtggcatgatctcagctcactgcaacctccacctcccacgtcaagcgattctcctggtcagcctccagagtagctgagattacaggcatgcctcaccaaaccttgctaatttttttgcatttttagtagagacagggtttcaccatgttggccaggctggtctcgaactcctgacctcaaatgatccacccgcctcagcctcccaatgtgctgggattacaggcatgaaccaccgcgcccagccaacacagaatattttaagctgaccatcaacctgctgtaaacattggagatctcagcacaaccctaaaacatccacaccccagggagagtatacagatattaacgtgccctcactacaaggagctccactgactccctttctggaaaatgactcaaatcggttttctggaggactatatgcaattaatagatataaaaataacatgttgtttgcttttatttacatgatttaccatttctgtttgtttttgagacagggtcttagtctgtcacccatgctggggtgcggtggcttaatcttggctcactgcaacctccacctcctgggctcaagcaatcctcccaccccaaccccttgagtagctgggactacaggtgtgcaccaacatgtttggctaatatttaaatttttggtagagatgaggtcccactatattgcccaggctggtctcaaactcctgaaatcaagcagttcttctgattcagcctccctaagtgctgggattacaggcgtgagccactgtgcctggctgatttaactttcataggttgttaagaaagcgattaaccctgtgaaccatggttggatttcactgattctcaaaacttgtagtgaattcttataattttatgttgccttgacatccattttaaatacaagtttaactttctcataggagaagcagggtttattcactgttaacactgtttccagttctccacctcctcccagttccttaatgtagtgaatccatatatctgccttagacaactgatacccagtgaccacctcgttataggacagccagatataacgttcatactggcctcactgacccccacgcttcatatgaactgtgtaggtgtgctacagtaaccacctctcagtcacactgtgatctccttgaacttgtgcctgcttgctttaaacccatcaattaaaattccctaggggaaacttttgtgtcttttttggtttgtttgtttttgagtcggcgtctcgctctgtcgcccagactggagtgcagtggcatgctctcggctcactgcaacctccacctcccagcttcaagcaattctcctgcctcagcctcccaagtctctgggactataagcacgtaccaccacgcccggccaattttttctatttttaacagagttggggtttcaccgtgttagccaggatggtcttgatctcctgacctcgtgatccaccggccttcgcctcccaaagtgctgggattacatacgtgaggcacctcgcccggctgtatccctaggggaaactttcggtaacaccctggactctaataaaggtactgacccatgggttcatccatttctccctttctctccatgtggtccctctgtgtgtgtggcctccgtgtatactgtgtatcctccaggacctgtaagtaataaaatccttatttccatcttatgtctctcgtaatcattgaaagggtgctctccattttaaagatcctaaattattacaattggtatagttggcaggatacagagtgattctcatgattagcacaagttatctttgagttgctatagcttattaacatcataaatcatctgggcaaccacactggtgaggtagtagtatttgctgtaataaatgaaatagagatgaaaaaacaacacaaggccaggcgtggtggctcacgcctgtaatcccagcactttgggaggccaaggcaggcggatcatgaggtcaggagatcgagaccatcttgactaacacgttgaaatcccgtctgtactaaaaatacataaaaaaaaaattagccaggcatagtggcaggtgcctgtagtcccagctactccggaggctgaggcaggagagtcacttcaacctgggaggcagaggttacagtgagccgagatcgcgccactgcactcccgcctgggtgacaaagcaagactctgtctcaaaaaaaaaaaaaaaaaagaaagaaagatcaacaaaatgaagagtttttttaaaaaggtaaaatcagcaaagctctagcctgactcactagataaaaatagcagattcaaataaagaaattcagatgtgaaaaaaaaggagttggccgggcatggtggctcacacctataatcccagcactttgggaggccaggcgggtggatcacctgaggtcaggagttcgagaccagcctggccaacatggtgaaccccgtctctactaaaaatacaaaaattagctgggcttggtggcgggcacctgtaatcccagctactcgggagtctgaggcaggagaatcgcttcaactggggaggcagaggtgacagtgagctgagatcgtgccattgcactccagcctgggagacaagagcgagacttcatctcaaaaaaaaaaaaaagaaaagaaaagaaaaagaaaaaaaaggagttggctgggtgtggtggctcacgcctatgatcccagcactttggaaggctgaggaaggaggatcacttgaggtcaggagttcaagacaagcctggccaacatggtaaaaccccgtctctactaaaaatacaaaaaattagctgggcatggtggcgcatgcctgtaatcccagctactcaggaagctgagacaggagaatcacttgaacacgggacggggaggttgcagtgagcggagatcgcaccactgcactccagcctggacgacagaacaagactgtctcaaaacaacaacaaaacaacaaaaaaaacagggtcattccaacttatactaaagaaatagaaagaattataaaacagactattatgaacaactacacaccaatgaattggaaaacctagaagaaatagataaattcctgggcacgtacaacctatcaaaattgcgtcgtgaagaaatagaaaatctgaacagactaataagaagtaatgaggttaaatcagtaataaaaagtgtcccatcaaagaaaagcccaggacctgatggcttcactgctgaattctaccaaacaaacacaactaaaaagtacaggccaacatccctgattaacatagatgtaaaaatcctcaacaaaatacatgcaaactgaattcaacagcacattgaacagaccattcaccctgaccaagtaggatgtatcccatgggtgtagggatagttcaacatatggaaaccaataaacgtgatacatcacagtaacagaatcaacaagaaaaaaatatcatttcaatatatgcagaaaatgacttgataacattccatatattcatgataaaaactcacaacagggccgggcgcagtggcttatgcctgtaaacccagcactgtgggaagccgaggcgggatcatgaggtcaagagatcgagaccatcctggccagcatggtgaaaccccatctctactaaaaatacaaaaaattagctgggcgtggtggcacatgcctgtagtcccagcaactcgggaggctgaggcaggaggatcacttgaacccaggaagcagaggatgcagtgaattgagatcgtgccactgcactccagcctggcgacagagtgagactccgtctcaaacaaaacaaagcaaaacaaaacaaaaaaaactcacaacaaattaggtatagaaggaacatatctcaacacaatgaaagctttatatgacaaacctacggcaaacatcatactgaacaggaaaaaaatggaatgctttttctctaagatctggaataagataagcactcccaccacttctagtcaatgttgtattggaagccctcatcagaattattagacaaaaaagaacaacaaaggaagggagggaaggaaggagaaaagccaaccaaattggaaaagaagaagtaaaattacatttttgcggacaagattgtatatatagaaaaccttgccgggcacggtggctcacgcctgtaatcccagcagtttgggaggctgaggcgggtgaatcacaaggtcaggggttcaagaccagcctgaccaacatggtgaaacccccgtctctactaaaaatacaaaaattagctgggcgtggtggcagacgcctgtaatcccagctactcaggaggctgaggcgggagaattgcttgaacctgacaggcggaggctgcagtgagccaagatcgtgccactgcactccagcctggcaacagagcgagactctgtctcaaaaaaaaaaaagaaaaagaaaaaagaaaaccctaaagacaccaccaaaaaattgttagaactaaaacaaatgcagcaaagttgaaggatatgaaaatcaacatataaaaatcagtagtggccccagcctggccaatatggtgaaaccccatctctactaaaaatatataaaaaaaaaaaaaattagccaggcatggtggcagatgcctgtagtcccagctactcgggaggctgaggcaggagaatcgcttgaacttgggaggcagaggttgcagtgagccgagatcgtgccactgcactctagcctgggcaagagagcgagactctgtctcaaaaaaaaaaaaaaaaaaaaaaattcagtagtgtttctatatgccaacagcaaactattagaaaaaggcatcaagaaaccaattccatagatgatagctacaaaaataaaatatttaggaataaatataaccaaagaggtgaaagagctctacaataaaaactataaaatgccggtgaaataaattgaagaggacacaaataaataggaggatattctgtgttcatggactgaaagaattaatatttttcttttcttttttttttttttgttttgagacagagtctcactctgtcaccccaggttggagtgcagtgctgtgatcacagcttactgcagccttgatgttccgggctcaagtaaccttcctgcctcagctgggactacaggcacacaccaccacgcccagctaattttttaaaaatttgttgtagagacgaggtctcactgtttcctgggctagtctcaaactactgggctcaagtgatccttctgcctctgcctgccaaagtgctgggaatacagatgtgagccaccatgcccagcttagaatattcttcaaatgtccataccacccaaagcaatttgcagattcaagtgtgatccctatcaaaatacaagagccatacttcacagaaatcgaaaaaattatcctaaaattcatatggaaccacaaaaatagccaaagcaatcttgagtatgacttcacaatagactacaaatctaaagtaaccaaaaaagcaccgtactggcataaacatagacagaccagtggaacagaatagagaaaccagaaataaattcacacacttaccaacgatttttgacaaaggtgccaaaaacacagactggagaaaggacagtctcttcaatgaatggtgatgggaaaactggattatcaacatgcagaacattgaaactggacccctatctttcaccatatacaaaaatccactcaaaatggattacggacttacatgtaagacttgaaactgtaaaactactaaaggaaaacagtaaaattctacatgaccttgtctgtgcaaggactttgtggataagaactcaaacacacgggcagcaaaagcaaaaacagacatgagattacatcaaacatctcaatcccagcattatctcactcattccacctctgggagttactctggggcagtctctggctggattcatctttctctgtgctctgcacagacctagtaccaaggggactagaagcagcatttacttgttcactaaaaaaggggtatctgcaggaaggtgctgcagttcaggctgtggccacgctggggcatcagtagacaggtaaaatgtagtaagataacccacagaaggtgcatcgtgacgtgcttgacagtaattctgtctgaagcgttttgttttgctttgttttgtttgagacagggtctcactctgtcacacagattgaagtgcggtggcatgatctcagctcactgcaatctccgcttcccaggttcaggcgattctcctgtctcagcctcccgagtagctggaattacaggcgtgtaccaccacacccggctgatttttatatttttaataagagacggggtttcaccacgtaggccaggctggtcttgaactcctgacctcaagctatctgcacacctcggcctcccaaagtactgggattacaggcgtgagccactgtgcctgggcataaagtgtttccattagcagtactcatgttgcggtattattgtcatcatcatcattttcataaagtagaaagtaaaacttctctcaatggtacccataatttacactgaagatgtaactattccttgagaacaagatagaacctggcctgggaaacagcactaatgcttgtaaattagttctgtgacaactattctgatttcttctatggttgcttattcttccataccatgtaagtaaattccgtgattattagttttgggtgattcatgctttccccactagaaagaacaatttggtttattacgctatcttccacccgtttctccaacaccagtcactatttcagtcagagcatgaagaaaaataattttggaaatggaaacctgatgttctgccatttaaaggtacttcatgaaatccactccaagagggatcacttgcttcatttccttgcagagttgttttttgtttttttttttttttttgcgatggggtcccactctgtcgcccaggctagagtgcagtggtgcaatcttggctcactgcaacctccgcctgctgggttcaagcaattctcctgcctcagcctcctgagtagctgggattacaggcgtcagccaccatgcatggctaatttttcgtatttttagtagagttggggtttcaccatgatggccaggctggtctcaaactcctgacctcgtgatccatccgccttaccctcccaaagtgctggattacagacatgagccactgtgcctggcccatttatttctttattgtgcaagcagtgacttatttatccactgcttttttttttttttttttttgagatggagtctggctctgtcacctaggctggagtgcagtggcgtgatctcagctcactgtaacctctgcctcccaggttcaagcaattatcttgcctcagcctcccaagtagctgggattacaggtgtgcaccaccacacccagctaatttttctgtttttagtggaaatagggtttcgctgtgttggcgaggctggtctcgaactcctggccttaagtgatctgcctgcctcggactcccaaagtgctgggattacagacataagccaccacaccaggcctggctctccatttcttgaacaccacctttaccccaggtacagaattagtggtaaatagttacacattacctattacataaactttccatacctaagaagttctctcccaccttttctggacactatatgctgctatttcttctcatattcttaaagatttccgagcaaagaatttctatttgcttaaattatcagatatatatttgatatacatgtctgtgaatagtgtgcagaggaaattaaaagtatccctcttcaataaagggaagtggttatcataggccctgggtctgggagtgaggtccaggtctacagtgaaggggggaggagacagggaagtcaatcctggggatcaaatctaaatgcctactaaaatccaaatggactgtgtaggaacaggtccctcatggatagaaaaacgaaaaaaacagtgctgagaacaagtaggaaagagacctagagactaggcgcagtggctcacgcctgtaaccccagcactatcggaggccgaggcggacagatcacttgagatcaggagttcaagaccagcctggccaacatggcgaaatcccgtttctactaaaaatacaaaaattagctgggtgtggtggtgcgcacctgtaatcccagctactcaagaggctgaagcatgagaagcctttgaatctgggaggcagagggtgcagtgagccaagatctcaccactgcactccagcttgggcgacagagcaagaccctatctcaaaaaaaaaaaagagagacctagagtgtcttggtatgctgaaggtcccacaaggtctatgcagtactgtggtcttttctcccttttttgtgtgtaaaacatacataaaattcaccatcataatcaattttaagtgtacagttcagtgccattaagaacattcatactagtgtgcaaccatcaccaccatccacctctggaaccctttttatcttgcaaaattgaaactctatgcccatgaaataactatccattacccaatttccctaacctttggcaaatggtattgtactttttctatcaatatgactactctagatacctgatataagtagaatcataccgtattgtctttacatgaatggcccatttcacttagcacgtcaaggttcatcttgcagcatatttgtaaatttccttactttgtaagactcagtaatattctcttgtatgtataaacttccttttgtttattcatctgttgatgaaaacctgagtagtttccagagtttacctattgtgaatgatgctatgtacacaggtgtacaaaacctatttgagactttgctttcaatcttttttgttttgttttgttttttgagacggagtcttgctctctcacccaggctggagtgcagtggcgcgacctcagctcactgcaagctctgcctcccgggttcatgccattctcctgcctcagcctcccgagcagttgggactacaggcgcctgccaccacgcccggctaatttttttttagtagagacggggtttcatcatgttagccaggatggtctcaatctcctgaccttgtgatccgcctgcttcggcctcccaaagtgctgggattacaagcgtgatccaccacgcccggccctgctttcaatctttttattttcccagaaatggaaatgctgatcatatgttatttctatattttaatctggggatctgccatactgttttcagcaggcttataccactgtacattcccagtgatagtgcacaatgttctccaacattccacatccttgacagtatttcttgttttccatctttgatactactaatcctaatgagatgctatgtatgtcttgagtttgatttgtatttccctaatgactaaagatgtcgagcattgttacgtgcttattggccatctgggtatcttctttggagaaatgtctattcaagtcctttcctccattttaaaattggattgtgtcttagcttgggttgctaaaacaaaataccataaattggaaagcttaattaatcaacaaacatttatttctcatggtttgggaggctgggaagtccaatatcaaggcactggcatagtccatgtctggtaagggcctgcttcccggttcaaagatagctatcttctcactgcaccctctcatggtgaagggcaaagctagctctctagggattcctatcaggaaactaatcccaattacaaggcctccatcttcatgatgtcctccaatcctaaaaaccaccagagacagggcctccaaataccatcacattgtgggggagagggggggcacgggggtaaggtttcaacatatgaatctgaggtggcatacactcagccaaaacattacacctctggcccccaaaatccatgtcatcacatgtaaaatatattcatctcatcccaaaggcctcaaaagtctcagttaattccagcatgaagcctaatgtttaaactcaaactccaaagtgtcatctcaatatcacatcactcagatatggatgagactcaattcatgctgaggcaaaattcttcttcagctccgaaccggtgaaaaccaaactagtcatgtatttccaaaatatgagacaggcacaggatagagattcctattccaaaagtgagaaacaggagaaaggggtgagctcccaaacaagtctgaaacccagaaagcaaactgaagactttccatattctttagatatgtagatacttgtagacctgtcctccactattcattttcacaggtattcgaaggttgtgtgataaatgaaagctttcccacattctttacgtaaggtttatctccattatgagctctttcatgtctttgaaaggaactggaataactgaacgtttttccacattgcttacattcatagggtttttctccggtatgagttctttcatgtattctaatggaactggcataattgaatgctttcccacattctttacattcatagggtttttctccagtatgagttctttcatgtgttcggacagaactaggacagtcaaaggctttaccacatacctgacatttataaggtccatctccagtgtgcagtatcatatgttttctaatccttttaagagaaatgaaggctttcccacatacctgacattcatagggtttctctccagtgtgagttctttcgtgtatttgaaatgaactgggacagtcaaaggctctaccacatacctgacatttataaggtccatctccagtgtgctttatcatgtgtcttcggacacttgggagagaaatgaaggctttcccgcattccttacattcatagggcttctctccagtgtgagtcctttcatgtgttcgaacattactggaagaactgaaggttttaccacatttattacattcatagggtttctccccagtatgagttctttcatgctttcgaacataactgggaaaaataaaggctctcccacatactttacatttataaggtccatccccagtgtgcctaatcatatgactttgaaaatttgtgaaagaaatgaaggccttcccacactgtttacattcatggggtttctctccagtatgagttctttcatgtattcgaaataaactggggcggtcaaaggcttttccacattcctgacatttataaggtccatctccagtgtgcctaatcatgtgtctttgaaaacttggaagagaaatgaaagcttttgcacattcctgacattcatagggtttctctccagtgtgagttctttcatgtatctgaaataaacttgggcgatcaaaggctttcccacattcctgacatttatatggtccatctccagtgtgcttaatcatgtgtcttcgaacacttgggagagaaatgaaggctttcccacattccggacatgcatagggtttctcaccagtgtgagttctttcatgtcttcgaaaggattgacaagaactgaaggctttcccacactgcttacatttatatggtttctctccatattcctgatagtcatatggtttgtgtccaaggtgagatctgatgtgcctactaagggatgaatgatgcatgaagactttcccacacaaactacattcacatggtcttactatagtaggaattttcttgttcagattaagattgagaatctgactgaaggcttctccacattgatcatattctttactttcactgagtccctcttccatatgatttctggaaaaaatagaaagcaagatttagtggtttgtgactttatatttattaataggtattcgacttacatttttaccataatcgcggaaagggtaagttttcaggcctgtatgaattgtttgaaagtgaatggatggaatgctctgcaagagagcttgacagtagctatcaccaaaaaagtgatatccatatatacagtttcttaatactatttccaagtgaatgattttgcaacactgaacatctatgccactttttctttttctggtgaaaaagttgtaggaataaataaatctgaagctgggcttactggtttgtttacttatttttaaaatttcatgacatactaagaaggagacattgctttatcttgtcagtgcaaattaccttaaaattctcccctgatttttgtaccaatcttcaatgctctggtcttcccatttttttcctaaaatatagtcagaaaaaatccttatgaactgatagacattacagaaaaatgactagattctaagttcatgataaggtgcaaacaaccctgatttattcacccaagtattcccttttccacattagacatcatgaaaaagcattaaaaagcaagaaatacttcttctctaactgactaaaagaaggaatgatgtcatccttacctacacaggccaggtttctaaaggtttcccgcatcacatctctgtagagtttcttctgggaaggatccagcaaagcccactcctcaagtgtgaagttcacagccacatcctcagaggccactgagtcctaaaacatcccaaatatgcaatgcaggaggaagaatgagatgacagtacagggatgtaaacccaattcataaaagttcacaaatggctaggtgtggtggctcatgcctgtaatcccagcactttgggaggccaaggcatacagatcacctgaggtcaggaacttgaggccagcccggtcaacatggtgaaaccccatctctactacagatatatgaattagctgggcgtggtggcgtatgcctgttaatcccggctactcaggaggctgaggcaggggaatcgcttaaacaagggaggcagaggttacggtgaaccaagatcacgccactgcacttcagcctggctgacagagagagaccccatctcaaacaaacaaacaaaaaacaaaacaaaaaagtcgacaaaacgatgtggcagtctccaaacatttattttatgataaataaatatggttgtcagaattccgtctacattcactttctcataaatttaattaccccatgaaaacatgcaactgatctctacatttttactgtagtcactacaagttttattggtctctaatggcaggatccagttcaccttggagaaacaaataaaatgctatacaaagaaaacaaattttggccaggcctggtggctcacacctgtaatcccagcactttgggaggctgaggcaagaggatcacaaggtcaggagtttgagaccagcctgaccaacacagtgaaaccccgtctctaccaaaaatacaaaaaaattagccgggcatggtggcatgcacctgtaatcccagctactcggggggctgaagcaggagaatagcttgaacccaggaagcggaggttgcagtgagctgagatcatgccattgcactccagcctggaggacagagagagactaagtctcaaaaaaaaaaaatttaagatcatcattcctaccaggaaaaacttccatttcctttcatatctcacaccaatcagcattccatgaaacacagggtaggccaggcgcactggctcatgcctgtaatcccaacactttgggaggcagaggcaggcggatcacctgagatcaggagtttgagaccagccagcccaacatggcaaaaccctgtctctactaaaaatacaaaaaattcactgggcgtggtggtgggcacctgtaataccagctacttgggaggctgaggaaggagaatcgcttgagaccaggaggcggacgttgcagtgagtagagattgtgccactgcactccagcctgggtgacaagagcaaaactctgtctcaaaaaaaaaaaaaaaaagaaagaaagaaagaaaaaaagaaacacaggataaaaactgaaaaaggtatccatgaataaataaatatacactgaagaagtgaaaccattttcttctgttcccttcatcaaacatgagaggccagaaggcccgtagaaatccacgttctgacaaaatccagctgaccacactttcctgaaggattccaggccatcagacgtagacagatcaagttggttgaaagaaaatattcctctgcaaaagaagtcattttaacctgcatgtataacatttgttatagactcactgattcctttgactctgtcccatttcactaggctaggaagctactgggaagacagaactcaggcatgaagaagaaggtatggcaacttaggcagcgccccctcacccagcaaaatccccagtcatgaacgtcaagggcagtttcccacctatttttaccttacatacacaaacatactaagaagacaaaatgccagaagagttttttctggcagatacataacaaggtaccctatgacttgctaaccttgaggaacaggttaagagttgcaatttctgagggatttcattcaagtccagatggtttgatggtgaatttgaccatgattataaaatacacgaagggatcagcagtgcttttctccaaaagaacataaaatcctctttctcaaatttcaagaggaaatgattcctgaccagtcactatgtgatactacattgtgtaatgtcaaggcaaaataaaataaggggaaagatgggttcttttggttttcttagaaatgggaacttgctccgtcatccacactggagtgcagtggcatgatcacagctcactgaagccttgatctcctgggctcatgtgatcctccctcctgagtctctcaagtagctagaactatagtcgcaagacaccatgtctagctaatttttaaattttttgtagagatggggtcttactttgttgctcaagctgatctcaaattcctgcctcagcctcccaaagtgctgggattacaggtgtaaaccaccacacctggctggaaagatgggttctgagaaagaatgaaatgtcctcaagatagcctcttacaaaatattttttaaattctataaatcccctaaaaactgttgaagagtcaacaaaaagttcttctccaaatgtagcaggaataatgaatatctaacaatggtcaaagtcttctgaagaacaacatgatagcttccctaacctttaacaagaattctgaatgctggccaggtatggtggctcatgtctgtaatcccagcactttgggagcctgaggcaggcagatcacttgagttcacttgagtcaggatcatttgagttaggagtttgagtctgacctgggaaacacggcgaaacctcgtctctactaaaaatacaaaaattagccaagcatgttgacgcgcacctgttaccccagctacctgggaggccgaggcaggagaatcacttgaacctgggaggtggaaagtgcagtgagccgagattgtgccactgcactccagcctgggtggcaagactctgtctccaaaaaaaataaaaaaaaaaataggagaaccatggtaggcactgaggaaaaaagaccacatatctttcttacaataccacagaaggccacaacccaggccaggaacaaaggctcactaacaaatcatatgattacaaaatatgtcacacctcaggtaaaatgctcaattaaagcccaagaaggaaggtcagagacaaaaaaagaaacaaaagcaagggcaactaatagaaaaaagtaaaaaatatggtagatattaatacaactgtatcaataatcactttgaatgtcaatagtccaaatataattagaagacagatgctgttatagtggattttaaaaacatagtatgttggctaaaaggaaaccactttaaatacaaagacacacatattaaaagtaaagggatagggaaatatataaaatgctaacattaattaaaagaaacatggcatggctatcttaatatcacaaagtacacttcagagaaaggaaaaaacacagagataagccaggtgcagtggcacatgcctatggtcccagctacttaggaggctgagatggaggatcacctgagaccaggagttcaaggatataatgcgctataatttattgtgaatagaccctgcactccagcctggggaacagcgagaccttcatctctataaaaaaaatttaaaaaaaaaaatttttttggccgggcgcggtggctcacacctgtaatcccagcactttgggaggccaaggcgggcggatcacgaggtcaggagattgagaccatcctggctaacacggtgaaaccccgtctctactaaaaatacaaaaaattagccgggcgtggtagcaggcgcctgtagtcccagctactcgggaggctgaggcaggagaatggcgtgaacccggaaggcggagcttgcagtgagccgagatcgcgccactgcactccagcctgggcgacagagcgagactccgtctcaaaaaaaaaaaaaaaaaaaaaaaaaaaattttttttttaattaaccagttggggtatcacaaacttgcagtcagctacttgagaagctgaggcaggtagattgctgcagcctgggagttcaaggctgcaaagagctatatgatcacaccactgcattccagcctgggagacacagtgagactctgtctctaaaaaaaataaattaaatttttaaaataaataaagagatataagtgagcatcacataatgataaaggactcaacatgccaagaaaacctgacaacccttagtgtgtgtttgcataacaagcgttgcaaaatacatgtggcaaaatacaactgatagaactgcaaagaaaaaatacactaatctacttgtatagttggagactgcagcacccctccagcagtaattaagagatccaacaggcagaaaatctgaaaggacatagtaaagtaaatagcatcatcaaacaactggatttaattgaaatgcatggaatacttcatctaacaatagcaaaacacaaattcttctcaagttcacaggaatattcacaaaaataaaccaaatactggggcataaaacacaccttaatatgaaaaattttaaaaaatcatacaaagtatgctcagaccacaagtcattcatctagaaatcaataacagagatagttaccaactcccccaaatctttagagattaaacaacacaattctaaataagcacatggatcaaagaagtctgagaaatcaaaaataatttttgacctaaaatgaaaatgaaaacaaaatttatcaaaaattagggtatgcagcaaaagcagtgcatagaggaatatttacagcattgaacacctacaccaggaaagaacaagggtttataatgaatcatctaagagtctacttcgggctgggtgcagtggctcacgcctataatcccagcaatttgggaggccaaggcgggcagattacttgaggccaggaattggagaccagcctggacaacatggtaaaacctcgtctctactaaaaatacaaaaattagctgggtgtggtggcgcatgcctgtaatcccagctactcagtaggctgagatacaagaatcacttgaacctgggagatggaggttacagtgagccaagatcatgccactgcactccagcctgggcgacacagcaggctgctgtctccaaaaaaaaaaaaaaaaaaaaaaacagaaaaaagaaaagagtctacttcaggaaaacagaaaaacaagagagcaaattaaacccaagtaagcagacagacagacagaataattggagaagtcaatgaaatggcaggaaatcaatagagattaaaaaaaaaaaacagaagtcggttattggagaacaccaataaaactgataaacctctagtcatggtaagaaaaaagaaattactaagatcagaaatgaaaggaggcaaaagtaaaaactaaagaacatttgacaaaatctaccatccactcacggtggcaaactgggaatagagaacttcctcctcagaaagaacatcaatgaggaacctgcagctaacatcatacttaacagtgagaaactagatgctttctacacaagaccagaaacagggtaagaatgtcttctctcaccactactattcaacaacatccttaaagtcctagataagcaacaagacagaggaaataaaaagtatatcgatttagaaggaagaaataaaattgtctttgctgcataagacatgattatataaaatatatagatggcatataaacatatgaaaacatgcatattttgtcactggggaattacaaatttaaaaattaaagactaacacaacctttattagaatggctaaaatttaaaacactgagaacaccaaatgatggcaaagatgtgaagcaataggaaccctcatttgttacttgtgggaatggaaaacagtgcacctattttggaagatggtcagtttcttataaaactaaacatactcggccaggcacagtggctcatgcctgtaatcccacaactttgggaggccaaggagggtggatcacctgaggtcaggagttcaagacccgcctggccaacatggtgaaaccttgtctctactaaaaatacaaaaattagctgggcatggtggcacatgcatgtaatcccagctactcgagaggctgaagcaggagaattgtctgagcccaggaggtggaggctgcagtaagccgagatcttgacactgcactccagcctggacgacagagcaaaactctgtctcaaaacaaaactaaacaaaacatactcaacatataacctaacaatcatgctccttggtatttatcaaaataagctgaaaacatgttcacacaaaaacctgtacatggatgtttatgggagttttattcataatttctagaatttagagttaaccaagagattcttgataaacaaatgaacaatctgcagtacatccatatgattaaatataatcatatggatgaaaagaagatatcaagccatgataagacatagaggaaatttaaaagtacgtcactgggccaggtgtggtggctcacacctgtaatcccagcactttgggaggcagaggcgggaggatcacctgaggtcaggagtttgagaccagcctgaccaaacggtgaaacctcatctctactaaaaataaaaaaatcagccgggcatggtggcggacacctgtaatcccagctactcaggaggctgaggcaggagaatcgcttgaaccaagggggcggaggttgcagtgagccaagatcacatcactgcactccagcctgggtgacagagtgagactccgtctcaaaaagaaaaaaagaaaagtatgttactaagtgatagaatccaatctaaaaaggccatatacaatgtattaccaactataagatattctgcaaaagacaaaactatgggacatgaaaaagtctttggttttaagggatttcaggatgcaaagggcagatgaatgaatgtgtaaactataggtgatttttagggcagtgaaactaccctaacagaaataacacatgtcattaaacattgtcaaagtccagtgaatatacaatagtcaactctaatgtaaaatgtaaacattaatgcatccatattggttcaactgtagtaaatgtaccacagtaatacaatatataaaaaatagggcaaactggccgggtgcggtggctcacgcctgtaatcccagcactttgggaggctcagacaggcagatcacgaggtcaagagatcgagaccatcctggccaacatggtgaaatccatctctactaaaaatacaaaaattagctgggcggagtggtgcgtgcctgtagtcccagctacttgggaggctgaggcaggagaattgcttgaacccgggaggtgcaggttgcactgagctgagactgtgcgactgcattccagagtggcgacagagcgtgactccgtctcaaaaaaaaaaaaaaaaatagggcaaaccgtaaagaagagtgatcattaaataactctgtacttaatgatcaatttttctgtaaacttaaaactgttctgaaaaaaatctgttacaaaaagttaaaatgaagagactcatgactgaaaagtaactaatcactgaaccatgttttttctttttttgagacagggtctcattttgtcacccagattggagtgcagtggtatgatcacagctcactgcagcctcaacctccaaggctaaagtgatccttccacctcagcctcccaaggatctgggactacaggtacatgtcaccatgctcaggaaatttttgtattttttgtagagacggggttttgtcatgttgcccaggctggtctcaaactcttgggctcaagcaatctgcctaccttggcctcccaaagtgctgacatggcaggcgtaagccaccacgcctggcccatatcatatttcatgcaactgatttgaacttattttagtaagccattatggtcatgaatgaggtcttcagccaatgccttgtttaggagccctgcactgtatattccgagaagttaggagcccagcactgtatattctgagaagttaaattagggccttggttaccatcagtactgtctagaattcggacatggatgagtatccatggtattgtggacttcgtataagatatgtattggccaggcaaggtggctcacatctgtaatcccaacactttgggaagccgatagagtgagccatcacatccagccctgaagtcttattctcattggtaaatacaagaaaaacagtaacagattatatagatttggaatgaacctgaaaactcctaatacttttaacagatggtttttagtatatatgtgcaatcataatcacaattttcatcacctcaaaaataagcccatgtactttttacctgtcaatctcctatcctcccatcttcttctgccagtccccagcccttgataagcagcaatctttcggtctctatagattttcctattatggacttccatataatcagaatcatgccatgtggtatgtgactggcttcattataggtttctcaagtcacatccatgttgtagcacgcatccccactttgtatttatggtagaattatattccactggatggatattacacattttctttatctatcatccaatgatgtattacagtcagccctccatacttggagtttctgtatcctcagattcgaccaccctctgatcatgtactatgtgattaggtctatgatggttaggtatatactgaacatgtacagactttttcttctttttattattccctaaacaacacaatataacaactattttacctaaaatttatgttgtatcaggtattataagtgagctaaagatgatttaaagtatatggaagacaatgttttctaagccgggcgtggtggctcacgcctgtaattccagcactttgggaggtcgaggggggcggatcacctgaggtcgggagttcgagaccagcctgaccaaaaaggagaaaccctgtctctactaaaaatacaaaattagccaggtgtggtggcgcatgcctgtaatcccagttactggggaggctgaggcaggagaatcacttgaacccgggaggcggaggttgcggtgagccgagatttcgccattgcactcccgcctgggcaacaagagtgaaactccgtctcaaaaaaaaaaaaaaagaaaaaaaagaaaagaaaatgttttcttaatttccattttgggttgttcagtgacaatgtataaaaataacagatttttgcaggttccatttgtatgctaccaatttgcttaattcatttattacttctaagtgcgtgtgtggggtgggggaagttcttggaagttctacatgtaaaatcacataatttgtgaacaggaaaaaatttccttcttcctgtccaattctgatatcttttctttttcttgtctaattactctgactagaacatccggtactatggcgaatagtagtggtaaaagttaactaagtctcaatagatttttttaaatagaataaaaaataatagtaagttaaaatataaaatgattgtataacacacattcaacatacgaatatacatttacactgttaatatataaatacaaaataaagtaaaatataaaataatattagctcggtgcagtggctcacacctgtaatcctaacactttaggaggcaaagacaggaggactgcttaatgccaaggagtttaagaccagcctggacaacatagtgaaatcctgtctctattaaaaaaaaaaaaatttggccaggcgcagtggctcacgcctgtaatcccagcactttgggaggccaaggtgggtggatcacgaggtcaggagttaaacactagcctggacaagatgatggaaccccatctctactaaaaatacaaaaaaattagccaggcatggtggtgggcacctgtaatcccagctacttgggaggctgaggcagagaattgcttgaacccaggaggcggaggttgcagtgagccaagattgcgccattgcattccagcctgggcaacacagcaagactctgtctaaaaaaaataaataaataaaaaataaaaaaattttaactagtcgagtgtggtggcacaagcctgtaatcccagctacttgggaggctgacacagaaggatacttgagtacaagaggtcaatgctacagtgagctatgattgcgccactacactccagtctgggcgacagagcaagaccctgtctcaaaaaaaaaagtatcaactttagttaataataatgttattggtttgccaattttcatcattatcagatgtaatatgttggtttataatcataactaatacactacactaacgcagtatgttaaaaataggggaggtaggccaggcgtggtggctcacgtctgtaatcctagcactttgggaggtcgaggcaggtggatcacctgaggtcaggagttcaagaccagcctggctaatgtggcgcaatccagtctctactaaaaaaattcaaaaaaaaattagctggacatggtggtgggcgcctgtaatcccagctactccggaggctgaggcagaagaatcgcttgaatctaggaggcagacattgcagtaagctgagatcgtgcctcctgtcaccacactccagcctcggtgacagaacgagactccatctcaaaaaaaaaaaaaaaaaaataggggaggtagggaaaaggggctctgtaatagctcccaaatttttctgtaaactatgaattaaaaaagcaaataaactaacctttcatggaaaattctagtgtaaaaaaagaaagctggctgggcacagtggctcacgcctgtaattccagcactttgggaggccgaggcgggtggatcacaaggtcaggagttcgagaccatcctggctaacatggtgaaaccccatctctaataaaaatacaaaaaaaaaaaaaaaagagtagggcaaggtggcacgtacctgtagtcccagttacttgggaggctgaggcaggagaatcgcttgaacccaggaggcagaggtagcagtgagccgagatcgtgccactgcactccagcctgggcgacagagcgacaattcctctcaaaaagacaaaaaagaaaaagaaaaaggccaggcgcagtggctcacgcctgtaatccaagcactttgggaggctgaggtgggcggatcacaaggtcaggagataaagaccatcctggctaactcggtgaaaccccatctctactaaaactacaaaaaagaaaaattagccaggtgtggtggtgggcgcctgtagtcccagctactcgggaggctgaggcaggagattggcgtgaatctgggaggcggagcttgcagtgagccgagatcgcgccactgcactccagcctgggtaacagaacgagactccgtctcaaaaaaaaaaaaaagaaaaaagaaacctgacattccatagtacacacagtataatgccacttgcgtaagattcattcaaaaatgaaatatgtaactgactggcttaaaataaaatatattgacatagggttgagtacacaggttaagaaaagcaaggaaattatcttataatctataacactggccccatctggaaagagaatggatgatttggcttctaggaatcatttcaagtggggcatgtggtgagaagtcttcaaagtcgtggcctggctgtcatgagactgacattccctttacaatgtttcagttgactgtgcaactgttttatgtagtttcctcatatgcaatatgtttagtaagtttccacaatgaaaactcaatacacaaataagtctcagtgtactccgaattttgagcatcaagccattgaagtcaacatttaaaagagagcatagggccagtgtggtggctcacatctgtgatcccaacactttgggaggctgaggcggacagatcagttgaggtcaggagttcgagaccagtctggccaacatggtgaaactccatctctattaaaaatacaaaaaccggctgggtgtggtagctcatgcctgtaatcccagcactttgggaggccaaggcgggcagatcacaaagtcaggagatcgccaccatcctggctaacatgatgaaaccccgtctctactaaaaacacaaaaaattagccgggcgtggtggcgggcgcctgtagtcccagctactcgggaggctgaggcagaagaatggtgtgaactcgggaggcagagcttgcagtgagccgagatggcaccactgcactccagcctgggtgacacagcaagactccgtctcaaaaaaaaatcagccaggtctggtggcaggcacctgtagtcccagctactcgagaggctgaggtaggagaattgcttgaacccaagagtggaggttgcggtgagctgagatcataccactgcactccagcctgggcaacagagactctgtctcaaaaaaaaaaaaagacagcatagccccagcctcaggaatgtggcaaaaccctgtctctacaaaaaaaaaaaaaaaaaaaaaagaaacacaaaaattagctgggtgtggtggcacgcacctgcagttccagctactcaagaggctcgagggaggaggatcacctgagcccaggaagtctaggctgcagtgagccattgactgcactactgcactccaccctgggtgatggggttaagaccctgcctcaaaaaacaaaaatagctaggcagggtggctcacgcctgtaatcccatcactttgggaggctgagatgggcggatcacctgaggtcaggagttcgagaccagcctggccaacaaggcaaatgcccatctccactaaaaatacaaaaaaattagctcggcgtggtagaacgcacctgtaatcccaactacttgggaggctgaggcaggagaattgcttgaacccaagaggcggaagttacagtgagccaaaatcgcgccactagactccagcctggggatggagactctgtctcaaaaaaaaaagaaaaaaaaaatcaaattaggaagcactacatggagaaatggcatagatccttagaaaagaggctgaatattaccatgatatatgcttaagctgtcccaaatacagtgctttatttaattccataaaattcacaaccagatttgcttggtatgttattaaacttaagaaatgctatttctgccaggcatggtggctcacgcctgtaatcccagcactttgggaggccgaggcaggcggatcacatggtcaggagatcaagaccgtcctggctaatacggtgaaaccccgtctctactaaaaatacaaaaaattagctgggcgtagtggcaggcacctgtaatcccagatactcaggaggctgaggccgaggaatcgcttgaacccgggagagaagaggttgcagtgagccaagattgtgccactgcactccagcctgggtgacagagcgagactctgtccaaaaaaaaaaaaaaaaaaaagaaatgctatttcttggcagggcatggtggctcacgcctgtaatcccagcactttgggaggctaaggtgttcaagaccagcctggccaacacagtgaaaccccgactctactaaaaatacaaaaattagccgggtatggtggtgggcgcctgtagtcccagctactcgggaggctgaggcacaagaattgcttgaaccgggtaggcagaggttgcagtgagtaaagatcacggcactacactccagcctgggtaacagagtgagactctgtctcaaaaaaaaaaaaaaaaaaaaaaaggtttaagaaacactacttctaggccaggcacacacatggaatcccagcattctgggaggccaaggtaggaggatcacttgaagccaggagttcaagatcagcctaggcaacataatgaaacctcaaccaaaattaaaaattagctgggcatgatagcacgtgtctgtagtcccagctactcaggaggttgaggcaggaggatcgcttgaacccaagagttgtaggctgcagtgagctatgatcacgccagtgcagatcatgcctggtgacatagggggaccatctcaaggaagaaaggaaggaaagaaagggaaaggaagaaagaaaagaaaaaaggaaaggaaggaaggaaaggaaaaaaaggaaagaaaggaaggaaaagaaaaaagggccgggcaccatagctcatgcctgtaatcccagcactttgggaggccgaggtgggtggatcacctgaggtcaggagttctacaccagcctgaccaacatagtgaaactctgtcactactaaaaatacaaaattagcagggcatggtggcacatcctgtagtcccagctacttgggaggctgaggcaggagaatcaattgaatcccggaggcagagtttgcagtgagccaagatcatgccgttgcactctggcctgggcaataagagagaaactccaccacaaaaaagaaaagaaggggccgggcgcggtggctcacgcctgtaatcccagcattttgggaggccaaggcgggcagatcacccaaggtcaggagttcaagaccagcctggccaaaacagtgaaaccttgtctttgtaaaaatacaaaaaaattagtcaggcgtggtggggtgcacctgtaatcccagctactcaggaggctgaggcaggagaatggcttgaacccaggaggtggaggttgcagtgagctgatatcacaccactgcactccagcctaggtgactgagtgaaacttcgtctcagaaaaaaaaaaaaaagagagaaggggaggggaggggaaggggaaggggaaggggaaggggaaagggaagggaccacttctaaaaactgaaatagccgggtgcagtggctcatgcctgtaatcccagcactttgggaggccaaggtgggtggatcctgaggtcaggagctcgagaccagcctggtcaacatagtgaaaccctgtctctactaaaaatacaaaaaattagccaggcatggtggcacacctgtagtcccagctactcgggaggctgaggcaggagaatcacttgaacccgggaggtggaggttgtggtgagccaagatcacgtcactgcactccagacggggcaacaaagcgagacttcgtctcaaaaaaaaaaaaaaaaaaaaaaacaactgaaataggactcaaatatctaaaaacagcaaagacttcgtacagtacactgttagaaaatgttacagcctgaatctgtgtgtccctcccaaaattcatatactgaaattctaactcctaatgtcgttgcattaggaggtggcatctttgggaggtaatcggggttagagaccatgagggtggtgccctcataaatgggattagcacctttagaagaaatgacaggagacagcttgcttcctctctcctctgccttgtgaggatataatgagagatgatgatctgaaaaccacaaagcaggcccttaccagacactacatctgccagcacttgaacttggacttcccagcctccagaactgtgaaaactacatgtgtgctgttcaagccacccagcctatggcaatgtattacagcatccccaggtgactaagacagtacagcactttctcaaccatacatcagggttatgaaataattaggacactatggcagtagcagaaagataaaccaaagaaatatgggaaattctgaaaccagggcatctatgtagggtatgtgaacctatgacagagcaggtatggtcagtcagggacagaaacgacggacagttaaaccccagcagcagtgataacccatcttctgccatcatctccacataatgttgtgaattcagtgtagagctgtctattgcagtgaattcttaaaattgtatgctacctcagaagccactttgaatatggctttaactttctcataccagaagcagggcttagtcacccttaatacagtttccagttctacgcctcctcccatttcctccatgtggtcaatccagttatctgccttacacagccgcctccctgtgaccacctccgcatgagacggctagatacaaactgctggaaatcatccaactgaccctacacaaggaatgcacagagaggctgcagggaccacctctcagtcaccatgtgactccacgaaattcccatctggttgctctaaactcaccaactagaactcccacagagtctccaataaaggcatctgcccagattcctctgtcttgctccctggttaggtgtgtatatcaggtctgaaacagccaccctcttcctgttggcctacaaggagaactatcctttctctctgggatctattacctagcagcctgtttcacccacagtcacaaggaaacccacattcagaaggttaaacaagcctgaggaccattcatgtgaagatgtggcccactcctaagagatgagtgagggagccgggtgtggtggctcatgcttgtaatcccagcactttgggaggccaaggcgggtggatcacctgaggtcaggagtttgagaccagcctggccaacacggagaaaccccccgtctctactaaaaatacaaaaaattagctgggcgtggtggcgcatgcctataatcccagctactcaggaggctgaggtaggagaatcacttgaacccaggaggcggaggttgtggtgagccaagatcgcaccattgcactccagcctgggcaacaagagcaaaattccgtctcaaaaaaaaaaaaaaaaaaaagaaatgagtgagggaaacatcctgggagctccacgcaccctactctcctctcctcatgatgtgattcacggtctcgattctcaccagtgaccagatgtttacctggagtcagtttaaggttctgacctctggtgtcctttctgtgacacccgaagtgtaaacaccgaccagttctaacagcaggtgtctaacagttcagttctgacaccactcagaattaggacagacctacaagttcagggctcagtctcacaacatgccagttcacatgccagtcacaagccgcagggccacccacacttctgaacaactgtgtacaaatcgtgagctcccataatctcctcctcgggttcaataatttgctaaaactattcaaagaacttagcaaaacatgttacttaagtataactcaggaacaggcaaataagagctgaaaaatggcagggaaaggggggtggatataggcaacgctcctcatcttggggtgcaccaccctcccagcacatcaatgtcctcatcaacctggaagtactctctgaatgtctttgctcaaaaatttttacacaactcaatctccagcctccactctttcctggggtagggaatggagcttaaagcaacaaccctctagtcatgggtttggtctttctggtcaccagtctccactctgaaagtatccaggggttccacagaatcacctcattagcttaaaactcaagtatggtctgaaaggggattgttgtgaataacaaaacacactccacctatcacttagggaattccaagggttttaggatccctgtcccaggaactgcagacaaacaccaaatatatttattacaccacagaagcaaatacactcgtaaattcataaaccttttctccagcagaaagaagccaaaggtgtctttctctaagtctgaccctcacagacatttgcagaaattacactctgactaaaccaactctgtggatacaaaaccaaattgctgacaatgttgaattttacccaagctctataatcctacagaatagctatgattaaaacactctccaccaccaccaccacccttggtgttccagagaagcagcatactgcgggggaaaaaaccctattactaatttagacgtcctttattttacctataagaaagccagacaggcggctgggtgcagtggctcacgcctgtaatcccagcactctgggaggccgaggtggacggatcacgaggtcaagaatcaagatcatcctggctaacacggtgaaaccccgtctctactaaaaatacaaaaaaaaaattagccaggaatggtggtgggcacctgtagtccaggctactcgggaggctgaggcaggagaatggcgtgaacccaggaggtggagcttgcagtgagccaagatcgcgccactgcactccagcctgggtgacagagcaagactctgtctcaaaaaagaaaaaacaaaacagactctccaaattcccattgtttacttcataaacaattggctggacagttttgtcttcactgatcagtcaaaacaaaatatctctaaatccaaccttaatggttaagtttctctcctcctttcagccctgaactttgacccatcctccacagcctaaggaagcacccacccaatccctcctttataaaccatcctaaaaacagactaacctcaggaaaaatattctctgacctaggatccgattttgcactttccactctgccctctcctcccacctattcctaatcttatttgttcctccccatgaatgaaaaacttttttaggggaagaggaggggagacagggtcttgctctgttgtccaggctagagtacaatgccagaatcattgctcactggagccttgatcttctgggctcaagggatcctcccacctcagcctcggctgggactataggtgtgcaccaccacaattttttttaattttgtagagagatggtcttactatgtgtacaggttagtctcaaactcctgacctcaagcaatcctcctgtttcggcctcccaaagtgctgggattatagatgtaagccgccacttccaccagaaaagcctttttctgcctaacctctgggatgcttgcagatcttgtatctactgctttcaccttttcgttatactcctttcacataaagtcacttcttacctaactccggatttcttgtatttgaggatgtctagaaacaactctctcaaatcatgggagcccatggtttactgttattatctgaacaattaactattacaacctcagacagggtatcaccctcccaactatgcctatgtgtgcatccccagcttcccagtggtctgtagcttctctcagtataaaggacccctcccctggttggagtgataaggctgggatgcctgccaagttctacccaggaagaaccaactgggacttcaatgacctccctttgcaggctcttagttgggagtcactctgaggcacacttggcctcagacctctgcttccttagacaagactatattcacttactttttttttttttttttgagactgagtttcactcttgttgctcaggctggagtgcagtggcacgatctcggctcaccgcaacttccgcctgctgggttcaagcaattctcctgcctcagcctcccgagtagctgggattacaggcatgcgccaccatgcccggctaattttgtatttttagtagaaacagggtttctccatgttggtcaggctggtctcaaactcacctcaggtgatccacccacctcagcctcccaaagggctgggattacaggcatgagccaccacgcccagtttcacttatttttaagtaagaaaatatcctgtgtttgaagaatccagcaaaatcactcaaacttaccatttatgtatataggaggaaaggaaactgtaagacatttgtattctttttttttttttttttgagacggagtctagctctgtcgcccaggctggagtccagtggcacgatcccggctcactgcaacctccgcctcccgggttcacgtcattctcctgcctcagccacccagcagctgggactacaggcacacaccgccacacccggctaatttttgtatttttagtagagaccgggtttcactgtgttagccaggatggtttccatctcctgaccttgtgatccgcacaccttggcctcccaaagtgctgggattaaaggcgtgagccaccgtgcccggccaattttttgtattttttagtagagacggggtttcaccatgttagccaggatggtcgcgatctcctgacctcgtgatccacctgccttggtgctgggataacaggcgtcagccatcgcggctggcaagacatttgtattctatagcttaaacatgaaaagcacatttatctatccctttcagacaatagagacctcacattattgttacttccatgacaacttctttactaatatttaattcactaatatttaatatttcaaagtcccatctgataggatttagcattaatcaccaaagtccagatgaaaggatacagaacagttatccattacgacaaaatctctaccctgcaaaggagaagatattttagagaatctctgtatttcaccaattaatgtggaaatgtattcgtttctctgtagccataatggaagactgaatttccctacttatctgagattcttatccgcagtagcattctcaaggctaagttctgggattgatctgaaatcacccaaaagaagaaaatagacctgagaaacctaccatacatgttgcggagaggaaactacacaaataagattttttaacaaattgaatgtaagactagataattgttttccctcaaatctactttctgcctctttctcccctttgtgaccctccctttgcaaacactttatcttgtctttcaagcactactgataaaatacattctacatttaatgaaaaacaggatcaaataagcaaataaaccttttcaagggtttacaaacccagggagaggcaatgctgacctggaatacagacatttatctgattccaatgtcaggtgaggtcaccctatcccctaggacatctcccagccccaccctggctcactgagtgctcagtgaccaacctccctgaagacagtgaattgtgccctgctcactctgccccaagcgcattttaactttcaggttctcgcaccatttcaatggggcaggttttccttctcctttgagatagttttcctcccttcactagactaaaaacaatccagaggtcaggaatcatttgtgtcttttcctctcagtaacagcctaagattgggtaaccatcaatgtgtccctaaggaacggaaactggggttgaggaagaaaagctgagcgtcccaaagggtaaacttttcagaggaaggggataccgggagactcctcccacctcagggcatacagctgctcccgtgagaggccccacccctacaccttaagctgtcctctgggaggagtgacccaggggttgataatcactagatcctccaagagaagtggcagctgtgggtatcctgggtcaggcccaggcagttctgaaaatcaggaccaggaaaagatagagggccacatcaccttgtaaagtttccaaaggggaaactccacccaaagacattctgattaggcgtcggggcttaggaaagataaaaggaggggaagcacaaaaatttttttaccacggccgggcgcggtggctcacgcctgtaatcccagcactttgggaggccgaggcaggcggatcacctgaggtcgggagttcgagaccagcctggccaacatggagaaaccctgtctctactaaaaatacaaaattagccgggcatggtggcgcatgcctgtaatcccagttacacgggaggctgaggcaggagaatcgcttgaacccaggaggtggaggttgcagtgagctgagatcgcgccattgcactccagcctgggcaataagagcgaaactctgtctcaaaaaaaaaaaaaaattttaccgtagagtgtcaggttcttattctccgtttccctctcaggttacaagtacacaaacaagaggccgggcgcggtggctcacgtctgtaataccagcattttgggaggcggaggtgagcggatcacctgaggtctggagtttgagaccaacctggccaacatggagaaacccagtttctaccaaaaatacaaaaagtagccggtcgtggcggcgcatgcctgtaatcccagttactcaggaggctgaggcaggagaattgcttgaacccggaaggcgaaggttgcagtgagctgagatcttcccactgcactccagcctgggcgacagagcgaaactctgtctgaaaagaaaaaaaaaacaacaaacagaaaacaaatcctttcaaaagagtatggtgaaagaaactataaacaactaaaatactgtgtcttaaatgtcaaacaaaaaacagctgataatgttgatttggcgaggggaggtcacctttgggaatgcggggaaggaaccggaaatttaggcatttatttccagccccagaaaaagctaggctaaaaaaaacgggagtcgtaggtttgagattctttttccagtacgtttggaagactcggaggaagaccagtcccccggaaaaaaagacgatgtactgggaaggccacagcccacagctcttcccatgcacgaaccgcacacccgagacgggattccgccttatgaccctcccgtgtcccagtacaaacaatctggagagaggcggggctgcgggcgcggagctgcccagacagggctccgaggccgaggccgcagtcgccgcgcagggacgggacaggacgcctggggtactggctacggcccaacccaccctgcggccgaggggacagagggccgagctgcgccagggaactcgggtcccagaccctggagtcgctgcagggaggccagggtgcttccacagccggttccggccggttcccacaagcccctcccccagtctccaggcgcccggccccgcacacgcaccatttcctggcttccagggtgtcccggggtcctgcctacggctctctccggcctgtgcaggtcccagcgcgccagacgctgcggtggagccaccggggccactggagaagcggagaccggaacccaaacgcagcggacacgaaacaggaagaccccgcggagttgttgaacattgcccctgtcccccttgcagagttcctgattggatggtttgcaggttcccgccccagtgcccctgattgggtgatgattcaagtcctgcccccttggtactgagtgacaggagaagcaatgcggtatgtggctgagtaaagacagattgacagggtcttggccactgcccttcgcgggccgggcttcctccttctgtaaccttctgtgccggggaggatatttgcatttaagcagaaagtgtttcaggctctgcagaggtgacactggcgtgtttctgcactcagggtgcccttcctgccttttcctcccggacacagagtcacaagtgtgcacagggaatgacagactcggcgtccagtggagccatcccctggcctcggagtaggaggcgcgcccaggccaggccagaccacagtgtaacaggagggaggagggcttgcttctttcaggcaagaaaattaaaacggacaaagaaataaaagtattaaatgtataggaaaaactggagtttttatgacagcgatcatctataaagaaaccaagagaagtaagcaaacatttgaactagctcagacaagcagcctgcttcacccgcagttcacaaggaaaacccacaatcataacgttaaaaatattcccaagcgccgggcgcggtggctcacgcctgtaatcccagaactttggaaggccaaggtgagaaaattgcttaaggtcaggagttcaagaccagcctaaccaacatggtgaaaccccatctctactaaaaatacaaaaattagccaggcgtggtggcaggtgcctgtaatcccagcaactcgggaagctgaggtacgagaatcgcttgaacctgggagggggaagttgcagtgagccgagatagcgccattgcactccagcctgggcgacagagcgagactaaaaaatgaaatatgaaatgaaatgaaataatgaaatgaagaaatgaaatataaaataaaataatcccaagcttgggacccagactctaactgctgaaatggaaccccagtgtggatcagaacctggtgatgagacagggacacttaagaattcaactttgggagctcaaggtgccctccagtcctctcctcacagtgtggaaacactctttccttcaaaaccttcatttgtaccagcaggaaactctcacccggagtcaatgtaaagtcgtgacctaaataaattgtcatgttcccaaaccttttctccaggggacaatgcaaacaagtttttcactgagtctgaccctcacagattttcttcatgtatacaaattacagcctgactcagcgaccccatgaatgctaaaaccaaaacactgtccaggaaatggccccaggcgccaaaggtacaacctcagaaaagacagaaccctccacccccaacccaaccacatctgcacatgggtctcctgcttttcacagctctgcagcttctcagaatccacattcctggccaggcgcggtggctcacgccagcactttgagaggcccaggcgggcggatcacctgaggtcaggagttcgagaccagcctggccaaatggtgaaacctcgtctatagtaaaaatacaaaaattagccgggcgtggtggcgcgtgcctgtaatcccagccactcgggaggctgaggcaggagaaccgcttgaacccgggaggcagaggttgcagtaagcccagactgcgccactgcactccagcctgggtgccaaaacagtgagactctgcctcaaaaaaataataaaagtaaaaaataaaattaaaattaaaaaaagaatctgcactcctgagcagctggaggccacctgcaagggcgggcaggctgcccaagaagcaccctttccctctctttgcaggctccagactggtctcaggctctcctgcccactgcagtttattcacttgcttctcaccaacactgatccacttaggtaagaaaaaagaccttcaatcccctttgctgtttgtttgtttttaagaaactagcagagttcctgctttccttctgtggttatgtataagctggaagacaaaaaattctaaaatactttatatggattttaaaactggcaagtaatgattcctttgagaaaacaaagatatcagctatgctattatgatttatacattggtttccatccatgcttcctgactcataactcccatagtccttgttacagtaaacagaaactctctctctctgaccttctcctgccccccattcacctgtccactgcagaactctaatgtgatcgtgggtcataagactctcactccaaagagtgtcctgtcctgtacgctggggaaaggaatgctacacagaagccaaaaattatctggacaggggttggatgcagtggttcacgcctgtaatcccagcactttgggaggctgcggagggaggattgctcgagcccaggaattcaagaccagcctgggaaagatgtcgagaccccatctctatgaaaaataaataaaaaggccggacgcggtggctcatgcctataatcccagcacttcaggaggctgaggtgggcggatcatgaggtcaagagatcgagaccctcctggccaacatggtgaaacccccgtctctactaaaaatacaaaaattagctgggcgtggtggcgcgtgcctgtagtcccagctacttgtagtcccagctacttgggaggctgagccaggagaatcacttgaacccaggaggcagaggttgcagtgagccgagatcactactgcactgcagcctggccgacagagtgagactccgtctcagaaaaaaatatttttctttttatgtattattattattattttgagacggagtcttgctctgtcgccaggctggagtgcagtggcgagatctcaagttgctcactgcaacttccgactcctagggttcaagcgattctcctgccccagcctcctgagtagctgggattacaagtgtgtgccactaagcctggctaatttttgtatttttagtagagatggggtttcaccatattggccagactggtcctgagctcctgacatcaagagatccacccgcctccgcctcccaaagtgatgggattacaggcaagagccactgtgcccagcctaataattttttgtctcctttctttaaaactgttttaggtgtggcgtcacatggcgtggcagcacatggtgtggtggtacatgcctgtaatcccagctactcaggaggctgaggcaggagaatcattgaacccaccaggcagaggttgcagtgagccgagatcttgccactgcacttcagcctgggtgacagagcaagaccctgtcgaaagaaagaaagaaagagagggagggagggagggggagagagagagaaagaaaaagaaagaaagagagaggagaggagagaaaagaaagagagaaagagggagggccgggtgcagtgcggtggctcacgcctgtaatcccagcactttgggaggccggggtgggtggattgcctgagctcgggagttcgagaccagcctggccaacatggcgaaatcccgtctctactaaaaatacaaaaaattagctgggcgtggtggcgggcgcctgtactcccagctactcgggaggctgaggcacgagaatcacttgaacctgggaggtggaggttgcagtgagtcaagatcgtgccactgcactccagcctgggtgacagagtgagactccatctcaaaaaaaaaaaaaaaaagagagagagaaagaaagaagggagggaaggaaagagagagaaagagaaagaagaaggaaggaagaaagaaagaaaggaaggaaggaaggaaggaaggattataccagtgctggggaggacataagagaaactggattctactcctactcctactcctactttggtggtggaaatgtaaaatggtacagagagcgcggtgagacgcagagtgcggccggcttgccgagtcccaagcaggcaggtgagctggagggcggggatgtcccgggacaggccgcggcccctgccccgcagacaccggggccctcgctgtgccgggcacagacgaagccccagccgagacgcagcgcctccaggtggctgcgggagcggcgggcgggaagcggggcggtcgcgatggggcgtcagggtgcagagggccctggaggcggtctagggacacaggctcggccgccttgctttagaccaggaagccgcgcagatccgggacctgggggacctctctgtcccagtggggcgagacctacctagccctgacgatagcggagaatagccttaaccggcctggaaggtgaacgagtcccctgactacgagtggaacgattagcggccatgcggctgttcgccttcgttctaccagaccttcatgtggaagagagaaatggtaaaatggcctggcacatgtggtcctgggaaatccccagcaccctttgggaagatttactgaccgtctatagaaggcctgtgtaggccaggcacggtggtggctcacgcctgtaatcacagcactttgggaggccaaggcggatggatcacctgaggtcgggagttcaagaccagcctgaccaacatggtgaaacccggtctctactaaaaatacaaaaattagtcgggcgtggtggcggacgcctgtaatcccagcttctcgggaggctgaggcaggagaatcacttgcagtgagccgagctcgcaccattgcactctagcctgggcaacaagagtgaaactccagctcaaaaaaaaaagaagaagaaggcctgtgtctataataggaaaaagctgctcaacttctccctcaacctaaaattttttttatttatttaattttatttgtttgagacagagtctttctctgttgcccaggctggagtgcagtagcgcaatcttagctcactgcaacctccgcctcccgggttcaagtgattctcctgcctcagcctcccaagtagctggtactacaggccacaccaccacgcccggctaatttttatatttttagtagacggggtttcactatgttggtcaggctactctcgaccccctgacctcgtgatccgcccgcctcagcctcccaaagtgctgggattacaggcgtgagcaaccgctcccgggtttgtttgttttgtttgtttgtttgttttgagacagagtctcactctgtcgctcaggctggagtgcaatggcaggatgtcagctcactgcaacctccacgtcgcgggttcaagtgattcttctgcctcagcctcccaggcagctgggattacaggcacccaccaccacgccccactaatttttttgtatttttgtagaaattgggtttcaccacatttgccaggctggtctcaaactcctgacctcaggtgatctgctggcctcagcctcccaaactgctgggattacaggtgcaagccaaggcgcctggcctttcctaggaattttaaaacaaaatatgcaaaatatattcatttacgaactctacatttgtcattgcactccagcctgggcaacaagaacgaaactccgtctcaaaaataaataaataaataaataaaaataaaaaataaaattcctatgaaatattgtcttctgaaaatttgagcatttttgcccactgggttgatggagacagaaagggttctaggccagaatgttcatatttggaagactttcaaattataactgttgtcacatgtttgcagtttattcaagactgctgttacatagtggaaaaattaactccttacttcaaatgtctagtctacctagatgtttggaagtgtcccacgtatattaaatatagaggtagtgaaatatcactgtaaatatctttttgttaaaatttataggaaacactgccttttggaaattgaattgtttaaccacctttgtgagcagtgtagtactgtgtatagttgttcgatagtttagaggaggtgggagggaagaaattgcaaaaggtaataggccagtgtgttcataattggacattttcagacactatttttctgtatgttttgtgcattttgttttgctctgtatatagcatatacaatgggcaaatgcatcctgattttgcaacatctaattgctggatgttaaagaggttgccagtgtgtgataaagtacttagtaaatttagcatattttgtatactttgtgttgaaattcataggaaacttgtcttctgtggatgacttttggataggagtttgttcaaccatctctaagcattacacatgcgtgtacttgtccactggattgaaagcagagagaaggaagtgaggagggaatggttcaaggccaaaatggtcatatttaggagatacctcagattataaccacggttacatgtgtggaattttatttaacagtgcgtgtacatggtggacaagttagatgaaatatctagtatttctagatatttggaagtgcttcatgtatttaaaagtagtagtagcataacactgttttttgtttttgtttttgttgagacggagtctcactctgtcacccaggctggagtgcagtggcacgatatcggctcattgcaacctccgcctcctgggctcaagcaattctcctgcctcagcctcctgagtagctgggattacaggggtgcaccaccatgcccagctaccttttgtgtttttagtagagacagggtttcaccatgttggctaggctggtcttgaactcctgacctcagatgatccacccacctaggcctcccaaagtgcttggattacaggcatgagccactgcgcccggcaaataatactttttgtaaataacttttaaaaactgatggggctggggccaggcacggtggctcacgcctgtaatcccagcactttgggagtccaaggcaggtggatcacgaggtcaggagatcgagaccatcctggctaacatggtgaaaccctgtctctactaaaaatacaaaaaattagccaggcgtggtggtgggtgcctgtagtcccagctacttgggaggctgaggcaggagaatggcgtgaacctgggagacggagcttgcagtgagctgagactgcgccactgcactccagcctgggtgacagagcgagactgtgtctcaaaaaaaaaaacaaaaaaaaaaaaacaactgatggggcacagtggctcacgcctgtaatcccaacactttgggtggctgaggctggtgaatcatttgaggtcaggagttccagaacagcctggccaacatggcgaaaccctgtctctactgaaaacacaaaaagtagctaggcttggtggtgagtgcctgtaatccctcagctactcaggaggctgaggcacgagaaccgcttgaacccaggaggcagagactgcagtgagctgagatcgtgccactgcactccaacctaggtgacagagtgagactctgtctcaaaaaataaaaaaagaaaaaaaactggtgggaaatactctttggaagtagaattgttgaaccacctctgtgaacagtgtactctctgtacttgttcattgggttgacggaggtgggtgagatgaaatttcctgattaggacattgtactacagctatgcaacatgttaccattgagagaaaatggctgtataatttcctacatgtgaatatgcaatgacctcaaaataaatttttgttaaaaagtacaccactggccaggtgcggtggctcacgcctgtaatcccagcactttgggaggccgaggtgggtggatcaggaggtcaggagatggagaccatcctggctaacatggtgaaaccccgtctctactaaaaatacaaaaaatttgccgggtgtggtggcgggagcctgtagttccagctactcgggaggctgaggcaggagactggcgtgaacccaggaggcagagcttgcagtgagcggagatcgcaccactgcactccagcctgggcaagagagcgagactccatctccaaaaaaaaaaagtataccactggattctgcaaacctcccgagcacacgtcggtagccggctccctggctgtctgaattaccaagctgtctccccagctgtatttccaaaatgtcgctttctaacaagctgatgctggacaagctggacgtgaaagggaagccggtcgttatgagagtcgacttcaattttcctatgaagaacaaccaggtaacaaacaactggaggattaaggctgctgtcccaagcatcaaattctgcttggacaatggatccaagtcagtagtccttataagccacctaggttggcctgatggtgtccctatgcctgacaagtactcctcagagccagttgctgtagaactcaaatctctgctgggcaaggatgttctgttcttgaaggactgtgtaggcccagaagtggagaaagcctgtaccaacccagctgctgggtctgtcatcctgcgggagaacctccgctttcatgtggaggaagagggaagggaaaagatgcttctgggaacaaggctaatgctgatccagccaaattagaagctttccaagcttcacttcccaagctaggggaagtctatgtcaatgatgcttttggcactgctcacagagcccacagctccatggcagaagtcaatctgccacagaaggctggtggttttttgatgaagaaggagctgaactactttgccgaggccttggagagcccagagcgacccttcctggccatcctgggcagaactaaagttgcagacaagatccagctgatcaagaacatgctgggcaaagtcaatgagatgattattggtagtggaatggcttgtaccttccttaaggtgctcagcaacatggagattggcacttctctgtttgatgaagagggagccaagactgtcaaagacctaatgtccaaagctgagaagaatggtgtgaagattatcttgcctgttgactttgtcactgctggcaagtttgatgagaataccaagactggccaagccactgtggcttctggcatacctgctggctggctgggcttggactgtggccctgaaagcagcaagaagtatgctggggctgtcactcaggctaagcagattgtgtggaatggtcctgtggggttttttggggttttttgtttgtttgttttttgagatggagtctcactctgtcacccaggctggagtgcaatggcgcggtcttggctcactgcaacctccacctccctgattcaagtgattctcctgcctcagcctccccagtagctgggactactggtgcgtgccaccacgcccggctaatttttgtatttttagtagagaccggtgtttcaccatgttgaccaggctggtctcgaactactgacctcatgatctgcccacctcggcctcccaaagtgctgggattacaggcatgagccaccgcgcccggccttctgtaggggtttttgaatgggaagcttttgcccggggaaccaaagccctcatggatgaggtggtggagacactgccacttgctgtgtagaatggaacatggaggataaagtcagccaggtgagcactgggggtggtgccggtttagagctcctagaaggtaaagtccatcctggggttgatactcttggcaatatttagtactttcctgccttttagttcctgtgcacagcccctaagtcaacttagcattttctgcatctccacttggcattagctaaaactttccatgtcaagattcagctagtggccaagagatgcagtgccgggaacccttaaatggttacacagaatctcagctcatctctactgcaaaaattcaaaaagtgaggtgagaggatcgcttgatcctgggaggttgaggctgcaatgagccataatcttgccactgcactacctgggagtgacaccctgtctcgaaacaacaacaacaacaacaacaaactggcactccacattcaaagggaagagaattaaactccatttaaagggactaaacgtttctgtctcccacctccaataaattaatataataaatccctactctccagtgtgctggtatttgcagatggggcctctgggagataattggtgaggtcttgagggtggggcacgcatgatggaatgagttaccttataagaagagacaccagggccgggcgcggtggctcccgcctgtaatcccagcactttgggaggccgaggtgggtggatcatgaggtcaggagatcgagaccattgtggctaacactgtgaaaccccatctctactaaaactacaaaaaattagccgggcatggtggcgggcacctgtagtcccagctacttgggaggctgaggcaggagagtggcgtgaacccaggaggcggagcttgcagtaagccgagatcgcgccactgcactccagcctgggccacagagtaagactctgtctcaaaaaaaaaaaaagaagagacaccaggctgggcgtggtggctcacacctgtaatcccagcactttgggaagctgaggcaggaggatcctttgagcccaagagtttgaggttgcagtgagctatgattgtgccacagcactccagcctgcgtgacaaagcgagaccctgtctcaataataataataataggctgagtgtagtggttcacacctgtaatcccagcattttgggaggcctaggtgggcggatcacctgagaacaggagttcgagacagtctggccaaaatggtgaaaccccatctctactaaagatacaaaaattagccgggcatggtggtgggcacctgtaatcccagctacttcggaggctgagacaggagaatcacttgacctcaggaggcagaggttgcagtgagccaagatcgcaccactgcacttcatcctggacgacagagtgagactctgtctcaaataatactactactaataaataataataataatgaaaaaacaccagagacctctctttctctctgtctttctctctgtcacccctatgccctcttcccaacttgaggacacaaccagaaagtagccatctttgagccaggaagaaagccctcaccaagaacagaatctactgtcattttgaccttggacttcatggtgtcaagaatcgtattttgttattgtattttgttattttgtaatcgtattgtattttgttatagtggctcaagtagagtaaaagacagaaatggcaagaaagttaaacccatcccactagaggtttgtcatggaggggacagagcgttgggtttaggcctgagctttggagttggaaagaattgagttcatacttaggcggggaccttgaacaagtcccttgagttctctaaacctcaatagccccttctgtaaaacgaagataataaagttgttgtgagtgcaccttgaaactgcaagacacatgtcttagcaccaggtaggcactcaataaatagaggtagtgctattctttttattaatgtctttctagttggtcatgctaatgatatagtgggacaggcagaactgggtcttcaagacttcaggtgccaggctgaggagcttggacttgcacttgagagcactagggagccatgggaggtgtgtgagcagggaagagagagaaaaatgtccctttggtgccgaggtgaatgactaggaattgaagtttgggagaccaaggaggacactttgacaggtacccaggtgagtgtctagacctgggtggtggcaattgggatgatgggagtgagaagaaataagtaggtcaggcttggtggctcatgcctgtaatcccagcactttgggaggccaaggtgggtggataacctgcggtcaggaattcaagaccagcctggccaacatggtgaaaccctgtctctactaaaaatacaaaaattacccaggtggggccaggtgcagtggctcacgcctgtaatcccagcactttgggaggccgaggcgggcagatcacaaggtcaggagttcaagactgggctgaccgacatggtgaaactcttgtctctactaaaaatacaaaaattagccaggcgtggtggtgcgtgtctgtaatcccagctactcgggaggctgaggcaggagaattgtttcaacccgggaagtggaggttgcagtgagccgagatcatgctactgcactccagcctgggcaacaagagtgaaactctgtctcagaaaaagaaaaaaaaaattatccaggcatggtggcaggtacctgtaatcacagctgccagggaggctgaggcaggagaatcacatgaacccgggaggtgaaggttgcagtgagccgagatcgcgctactgcactccagcctgggtgacagagtgagactccgtctcaaaataataataataataataaataaataaatacataaataagtagttaagtagttcaagatgagtattgggtatagggcttgaatggtagctccacgacccaggtcggaagtagcagttaagaggggttggggtcggggtatcaatgtcagttttcactttgcctagaatattttttcttgttgtgtcttcctgaaatattcttactggtctttggagacactgcccaaagatccctcctctgagaatctccctggaacatgtgtggtcctgcaaagctgctgctcatgatgttatcctacaaacatccaaatcccggcatatgagtttctctagggcagtctctggctggttccattgtaggatctgtccacgccctgcatatgcctggtaccaaaaaaggaaactgggtctgcaggacgttgctgcagttcaggcattggccgcgtgggggcagaagtgcacaggtcaaagcgtctggaaaaagccctcaggctgcaggaccagcagagcatcaccaaggacgtccctggttgagaactacgtctttttattcgttttaaaggggcgcataggcactaggatccagttttgtccacctaacccacccacccagcgacacacgccccgcagcccatagctggaggatatttacgcaaaacctaaatcagatcagtctttcctttgctcagaacattttttttttttgagggacggagtcttgctctgtcgcccagactggagtgcaatggtgcaatctcggcttactacaacctccacctcccaggttcatgtaactctcctgcctcagcctcccgaatagctgggattacagatgtgagccaccacgcccagctagtttttgtatttttaatagagacggggtttcaccacgttggtcgggctggtctcgaactcctgacctcaagtgatccacccgcctcggcctcccaaagtgccgggattacaggcatgagccatcgcgcccagcctgctcagaaccatttgtggctcccacttaacccagtgggagtgctgaaataacttaaacattttacatggcatttacaaatgcgatattttattctttaatcctttaaaatctctccatcaataaaactcttcagaagtccttaccagttgttacaaatctaaaatataaatatacaaataagtggtaatgtatgttctctcaaacattctgacactacttctacactcaaccaaattgtgatatacttttccatttaaaattaccagtcttggccggacgtggtggctcacgcctgtaatcccagtactttgggaggccaaggcgggtggatcaactgaggtcaggagttcaagaccagcctggccaacatgatgaaaccccatctctactaaaaatacaaaaaagttagccaggtgtggtggccggtgcctgtaatctcagttacttgggagggtgaggcaggagaatcgcttgagcctgggaggcagaggttgcggtgagccgagatcaagccattacactccagcctgggcaacaaagcaaaactctgtcttttttttttttttttttaaaggaacctcgctctgttgccaggctggagtgcagtggcgtgatctcagctctctgcaacctccgcctcctgggttcaagcgattctcctgcctcagcctcctgagtagctgggactacaggtgtgtgccaccacgcctagctacttttttgtattcttagtagagatggggtttcaccatgttggccaggatggtctcgatctcttgaccttgtgatccacctgcctcagactcccaaagtgctgggattacaggcgtgagccaccgtgcccagcgaaactctgtctttaaaaaaaaaaaaataccagtcctggtgaggcgcagtgtctcccgcctataatcccagcactctgggaggccgaagcgtgtggatcacttgaagtcaggagttcaagaccagcctggccaatgtggtgaaaccccatctctactaaaaacacgaaaattagccgggcgttgtggtgcatgcctgtaatcccaactatttgagaggctgaggcaggagagtcacttgaacccagaaggtggaggttgcagtgagctgagatcatgtcaatgcactccagcctgggtgatagagcaagactccctctcaaaaaaaaaaaaaaaaaaaaaggccgggcgcggtggctcatgcctgtaatcctggcaccttgggaggctgaggtaggcagattgcctgagctcaggagttcaagagcagcttgggcaacatggtgaaaccctgtctctattaaaaatacaaaaattaaccaggcgtggtggcgggcgcctgtaatcatggctgcccaggaggctggggcaggagaatcacctgaacttgggaggtggaggttgcagtgagctgagattctgccagggcactccagcctaggcaacagagtgagattctgtctaaaaaaaaaaaaaaaaaaaaaaaaagccgggtgcggtggctcacgcctgtaatcccaccactttgggagatagaggctggcggatcacgaggtcaggagatcgagaccatcctggctaacacagtgaaaccctgtctctactaaaaatacaaaaaattgactataaatcatgctgctataaagacacatgcacacgtatgtttattgcggcactattcacaatagcaaagacttggaaccaacccaaatgtccaacaatgatagactagattaagaaaatgtggcacatatacaccatggaatactatgcagccataaaaaatgatgagttcatgtcctttgtacggacatggatgaaattggaaatcatcattctcagtaaactatcgcaagaacaaaaaaccaaacactgcatattctcactcataagtgggaattgaataacgagaacacatggacacaggaaggggaacatcacactctggggactgttgtggagtagggggaggggggagggatagcattaggagatatacttaatgctaaatgacgagttaatgggtgcagcacaccagcatggcacatgtatacatatgtaactaccctgcacattgtgcacatgtaccctaaaacttaaagcataataataataaaataaaataaaataaataaataaataaaaatagaaaagaactatgtaccattaaaaaaaaaaatacaaaaaattagccgggcgtggtcgtgggcgcctaaagtcccagctactcaggaggctgaggcaggagaatggcgtgaacccgggaggcagagctggcagtgagccgagattgcaccactgcactccagcctggacgacagagcgagactccgtctcaaaaaaaaaaaaaaagtattgaactgttgttgatgatgtgagcaatggagaattaggagggaagtgtacagccttgtgtaatttatattaacatgcgtaaaaatcgagatggatgaagcgatatctacaaagagattaaaacaagctgggcacggtggctcacgcctgtaatcccagcactttgggaggccgaggagggcggatcacctgaggtcgggagttcgagaccagcctgaccaccatggagaaaacctctctctactaaaaatataaaattagctgggtgtagtggcgcatgcccgtaatcccagctactcaggaggctgaagcaggagaatcccttgaacctgggaggcagaggttgcggtgaaccgagatcatgccattgcactccagcctgggcaacaagagtgaaactccatctcaaaaaaagaaaaaaaaaacacacacaaatatattcaaatattaattgcgttatctaggggtatgtgggtgtttaagagaacctaaatcctgttatccataatagctacaccattttacattcccactaacaatgaaaagcattccaaattctatggatcctcaccagcacttgttattttctgtgattttgacgaacgtgaagaattatctctttgtgcttttgatcttcatttctcttatgacttgtaatgttgaacgtctattcctatggaggctttttttttttttttttttttttgcattttttaaagacagggtctcactctctcaccctggagtgcagtagtgcaatcacagctgactgcagcctcgaactcctggactcaagagaccctcctgcgtcgatcccaaaatgctgggattataggcatgagctactgtgccggccaatatcaagacacttttccaagtgatgagaccagccatttagtctatccttaaagaactgagtcatggaaatttaatcatgtcaatagtcttttttacattattaaccaaacaaaaatgagttccttttaaagatttttttaagattaggaaatagctgggcttggtggctcaagcatgtaatcccagcactttgggaggctgattgcttaaatccaggaatttgaaactagcccagccaacatgctgaaatcctgtcttcacaaaaaaatacaaaaaattatcgaggtgaggtggcacatacctgtaatctcagctactggggaggctgaggtgggaggatcacctgagcctggggaggttgaggctgcagtgagccctgatcctaccactgcactccagcctgggcaacaaagtgagatcctgcctcccaaaaaaagttggagcggggaggctgggtgcggtggctcacgcctgtaatcccagcactttgggaggcccaggcgggtggatcatgaggtcagaagatcgagaccatcctggctaacatggtgaaaccacatctcttctaaaaatacaaaaaaaattagccgagggtggtggcgggctcctgtagtcccagctactcaggaggctgaggcaggagaatggcgtgaacccgggaggcggagcttgcagtgagccgagatcacgccactgcactccagcctgggcgaccaagcaagacaccgtctcaaaaaaaaaaaattggagcggggaggaggagccacatcaggatggtacagtggatgcctaatgattttacaataaaactctcacaaaattgttcttgttcaacaaaaggaatgtgcaggagcactgtcatggtggtgaaggactctctggtggaactttcctggatatttttctgccaaagctttggctgactttctcaaaacactcataataagcagaggtttttattctttgaccttccagaaggtcacacttagtactatgttttttgttttggcttggtttttttgagacagtctcactctgtcacccaggctggagtgcagtggcccgatctcggctcactgcaacctctgcctcccaggttcaagcgattgtactgcctcagcttcccaggtacctgggattacaggcgtacagcaccatgcccggctaatttttgtatttttggtagagatgggggttctctatcttggccaggctggtctctaaatcctggcttcaagtgatccacccaccacggcctcccgaggggctaggattacaggcgtgagacactgtgaccggctggtactatgttttgaacataggaattgtgaggcctctagctttgttcttgtttttcaagattgttttggatatttcagattcttggaagtttcatatacattttcagattcttttttctatttttgcaaaaaaatgccattgaatttgttatgaattgcattgaatctgtgcatcagtttgagtagtgatttacaattggataatttcacaatattaagtagtctaatctatgaactggggatgttgtgagaatatagagaaaaacaaatcaacacaatttctctgagtgttaggcttttccatacacacccagcaagcaattctgcagaggattcaccagctagatatcctcaaattctattcaattccaatactatctatctggagatagcatcacatcccaaagatcaaggacaatgttccacaagactgtccctcatcttagatgccagtcacaagccagggcctctagaacttctggaccaacttaaacactggggttccgaaaaccccttccttgagtttaattagtgtgatatttaatattgagtgtcaacgtgattgaaggatgcaaaatactgtccctgggtgtgtctgtgagggtgttgccaaaggagattaacatttgagtcagtggactgggggaggcagacccaccctcagtttgggtgggcaccatctaatcagctgccagcgtggctagaataaagcaggcagaagaaaatgcaaggagctgacttgttgagtcttcccgtcttcatctttctcctgtgctggatgcttcctgccctcaaacatcagacttcaaattcttcagctttgggattcttggacgtacaccagtgatttgccagggtctctcgggcctttggccacagaccgaaggctacactgtcggcttccctaacttttgaggttttgggatttagactgatccaccactggcttccttgctcctcaacttacagactatcgtgggactttaccttgtgattctgtgagtcaattctaataaactccctttcatatatacagatatcctactagtctttccctctagagaaccctgactagtacgatttgctagaacagctcagaaaactcagagaaacatattagtttaatttaccccccttttttttttctgagacggggtcttgccttgttgcccagactggtcttgaactcctgggctcaagcgatcctcccacctcagcctctcaagtagctgggactacaggctcatgccactgtgcccaattttgtttacccacttattacaaagaatattacaaaagatacaggtgaacagccagatggaagagatgtatgactctaggtgtgacacctttcaggaacctccacacgttcagctccccagaagctcccggacccaggcctttcaagttgaatggagtcatcattatgtagtcatgactgattacattattgcccattgtttatcaacttaaccttcagtccatctccccactctggaggtccaaaggaatggagctgaaagttccaatcctataatcacatggttatttcctttgctacctgcccccccatcctgaggctatccagcaggcccaagccatcagtcaactcattagcatacaaaatgtcacttatcacttttaagactcaaaaaattttaggggttatatgacaagaaacgggaagaagattgctatggtatgaagacagtagggacaccttttattagcggcctgtggaccccaagcatggaaataaagaaaaatcctgagtttaaaggaaattctaggcacctagtgaagccatgagaagcaaataagtaacttgttaaacaagaaggtaatagatctaaaacaatagctcaggaagttagaggcccagatatgtttgctttccccatataaactaagggtaagatcttttttttttttgaaagggagtcttgctctttcacccaggccagagtgcagtggcgctatctcggctcactgcaagctctgcctcctgggttcacgccattctcctgcctcagcctcctgagtagctgggactacaggcgcccgccaccgcgcctggctaattttttgtatttttagtagagacggggtttcaccgtgttcgccaggatggtctcgatctcctgacctcgtgatctgcccgcctcagcctcccaaagtgctgggattacaggcgtgagccaccacgcccggcaggataacatcttaacatacatcccggagttgtctttcagaggcttggaaccccactgaggacccccgctgaacagatccattcactggcacagactcctagataaggaagaagtgaagactaaacttgacctttgttctgtttcttccttgggggattagagaaagtcactccctgtaaccagttatttttctactgacccctgtcaggcctctgagcccaagcctgcacgaatacatccagatggcctgaagcaagtgaagaatcacaaaagaagtgaaaatagctggttcctgccttaactgacattaccttgtgaaattccttttcttggctcagaagctcctccactgagcaccttatgacccccactcctgcccgcgagaaaacaaccccctttgactgtaattttccactacctacccaaatcctataaaacagccccacccctatctcccttcactgactctttctggactcagcctgcctgcacccaggtgaaataaacagctttactgctcacacaaagcctgtttggtggtctcttcacacggacacgcgtgacaacccgatttttcttttttttaatcttatgacctcatttttctcagagatgaagtcttgttatgttgcctaggctggtcttgaaatcctggcctcaaatgatcctcttgcctaggcctcgcaaagtgctggcattacaggcatgagccaccgcacctaacttaaagttttttttttttttttgaaacggagattcactcttgttgcccaggctggagtgcaatggcgtgatctcaactcactgcaacctctacctcccgagttcaagcgattcgcctgcctcagtctcccaagtagctgggattacaggtgtgagccatttgcccagcctagcttaaatttttaaacaaaacttctctcttccttttttttttgtttgtttttgagatggagtctcgctctgttgcccaggctagagtgcaatggcgcaatcttggctcactgcaacctccgcctcccgggttcaagctattctcatgtttcagcctcccgagaagctgggattacaggcacccaccaccacgcccggctaatttttgtatttttagtagagaccagttttcgtcatgttgatcaggttggtctcgaactcctgacctcaggtgatccgccggcctcggcctcccaaagtgctgggattacaggcgtgagccaccgcgcccagcttacttctttcttccttaaccaattgcaaatgtgatctttgaatctacctgtgacttatgagccccacttcaagatattccattcttttaagcttataccactgtgtaacctccatgtactgatttatgattcttgcctgtagcctctgctttcctgaaatttacccctgccttttccgtgtgtgtctgtgtgtgtgtttcccctgctgtctttacaatactcctgcctttaaaaactcttacctgcggccaggtgcggtggcttacccctataatcccagcactttgggaggccaatgtgggcagatcacccgaggtcaggagtccaagaccagcctggccaacatggtgaaaccccatctctactaaaaatacaaaaaattagctgggcgtggtggcaggtgcctgtaatcccagctactcgggggcggggacgggggagactgaggcaggagaattgcttaaacccaggaggcagaggttgcagtgagccgagattgcaccattgcactccagcctgggtgacagagcaagattccgtctcagaaaaacaaaacaaaacaaaacaaaaaacccaaaaactcttacctgcaagctattgggagctcaagtcaggccaggtgaggtggctcactcctgtaatcccagcactttgggaggccgaggctggtggatcacaaggtcaggagatcgagaccagcctgaccaacatggtggaaccccatctctactaaaaatacaaaaaattagccaggtgtggtggcacgtgcctgtagtcccagttactcgggaggctgaggcaggagaatagcttgaactccggaggtggaggttgcagtgagctgagatcgcgccactgcactccagcctgggcgacagagtgagagtctgtctcagcactcctgcctgggccatagagcaagactctgtctcaaaataaataaataaataaattatagagtgtaccttcttacatttagtgggactcctagatataactgattcctgggattgattaatcccatgaaggattgtcagttagtgcattacagagatgttaaaattaaaaattttaacccgggaggcggagattgcagtgagccgagatcgcgcctccagcctgggcaacagggagactccatctataaataaataaataaattaattaaatggggcctagctatgctgaccaggctggtctcaacttcctgggatcaagtaatgctcccaccttgtgtcctaaagcactggcattacaggtgtgagctactatgcctggcctcacgttgacatctgatctccaaagcagctgttttgagaggtgcggccaggtggcaggtgtttgggtcaaaaaggcaactccatcacaatagattaacgcccttctgttattgctttcacaggaatggttcccacgagagtaggttattaaagggtctgtcttccttgatgtcctcttacttcctgtctcaccacgtgatctctgcacacgctggttccccttctgctttctgccgcaaatgtaggcaggtgaaaccctctccagatgcagcctgaacaagattttactaatgagaagagcatgaagtctttcatgaggcatctaccctatgacttaaacacctcccactaggcctaaaaccactacactggaccatatttcaataactatggagaagacattgaaaccctagcaggaatttcctggatgacaacagatgctttacataatttaaggatactgggatttattcaggtttgaatacgtttgttgagctacaggaatgccacaggggttgtcccttataacccagaggatcagggtctctgttgagatagaggcatgggcagcggcagcagcagaggtacttaaaggtccagctgagtgtgaacttcaggacaccatctaatggtagcttccccaccttctcttctttcgcattttttcttttttcttttttttgagatggagtctcgctctgctgcccaggtttatgtgcagtagggcaatcttagctcaccgcaacctccacctcccaggttcaagtgatactcctgcctcagtctcctgagtagctgtgattacaggtgtaaaccaccacgcctagccttctttctcacttttttttttttttttttgagacggagtcttactctgtcgcccaggctggagtgcagtggtgcgatctcggctcactgcaacctctgcctcccaggttcaagagattctactgcctcagcctcccgagtagctggcattacaggcgtccaccactatgcccagctaatttttgtatttttagtagagatggggtttcaccataatggccaggctggtctcaaacttctgacctcaggtgatctgtctgccttggcctcccaaagtggtgggattacaagcgtgagccaccaccactgcgccaggctctttctcattttcaaatgactgctctttcaggaatgaccactaatggggccccaacatgcacaagataaaatctcaccaccagcccccaccaccagacctacaggacaaggccaacacctagcatcagtcccagcttcattctacatagaaaggcaaagtgaaaactcctagcccagaccattttaaggagggcccaaatccgatactcctgctcctaaatgccaaagacttatagaaactgccatcttcggttggctaaatctggaacacaagtttgttcggcctcagcaatggaacacagagcagcaagcagcagcagctcaaagagcatgctggccaccaggtagcagagcaggttagcacctgagagaaagggaaagctgacccattgcatggtgaccaacatctagacatcctgctgacagtgccaactgttacggttgcctgaaaaggtgtgcttcagaggttgacaccgagagctatgtggtgcacacacacaccgagagtatgaaaaggcttattacaaaaatgaggtatcagagagaacaatgcagggctctcaagcaagtgtgacatggcgtgagagcaaggaagatggcattcctgtcccttatgagtactgatgcaaaaatcttgaaataaatgccagcaaagcatataaagcaatatattcaaagcattatgcaatataaccaagtgagatttgtccctggaatgtaaggatggttcaccatatggaaattgatcagtggaatacaccacattaggaaatgacggaaaaatgacagtctcaattgatgcaaaaaagcatgacataattcaacacccatttatgattaaaaatctgcaacaaacaaggaatataatttactcaaattgctacaaggcatatatgaaaaactcaataaaatctttgatggtgaaaaaccatatttttaatatctaatatcagaaacaaggatatttgctctcaccagctccattcagtgttaaggggggtgctcccagggaaatcaggcaagaaaatgcaagcattccagccgggcctggtggctcaagcctctaatcccagcactttgagaggccgaggcaggcagatcacaaggtcaggagggcgagaccatcctggccaacatggtgaaaccccgtctctactaaaaataaaaaaactagctcggtatggtggcacgcgcctgtaatcccagctactcaggaggctgaaacaggagaattgcttgaacctgggaggcagagattgcagtgagccgagatcatgccactgcagtccagcttggtgacagagcgagactgtgtctcaaaaaaacaacaaacaaacaaaataaccagccaggcagagtggctcacgcctgtaatcccagcactttggggagaccgaggtgggtggatcacaaggtcaggagattgagaccatcctggtcaacatggtgaaaccccatctctactaaaaatacaaaaaaatttagctggttgtggtggcacgcgcctatagtcccagctactcaggaggctgaggcaggagaattgcttgaacctgagaagtggaggttgcagtgagccaagattgtgccactgcactccagcctggcaacagtgagaatccatctcaaaaaaaaaaaaaaaaaaaaaaacctaaaagcattccatatttaaaaatatatataaatatatatacacacagccctctagacaaatatacaaaaatcacacacgttatcactgtacatacaggtggacagacacaaattcacaaacccacaggtgtaacagcccagatactaaaagattctcccaaatagaaggaccccaggtgttctgatctcttctccaggtttctctggctcctcgggaataaccaccacagtgccttatatatccttgcttgctttcgtgtcttccagaatgccaggatcaaggggacagagatattagcacagctttgttgactacacctattagagggagttacacagaggaaaatacttactgaatattaggactcacacagacacatacacaaaagggttttacaaaaacatcatcatagacccacatatacttgtccttcaaaaagtgaatgttctcactcccattcctgtagcagagataccccttagttccccaatacctatcacaaaagatggctccttgagcccattctgacagtgaaggaatctcgaacttcctgacctcccacagtacaataatcatctctctacaaaagcacaacatggcagctcaagaatgtgaaaggacctgaaatgggttgagtaataatgttccaacccctcatactaccataaatgttcctggtgagagaagcgaatgttcctggtgagagaagcgaaggtgtgcatctcctggctcagccaccaggtcctccactgcatctccacagtagccgtcacttccactgaggcctcatctgccagcaaaccttgctccagtcggcctctggaccctagtatcttcaccgtggttttggatgctgccacctgacccatccctgctgttgggggagggtggaggccagaggcctaaagagttccgacccgagcgacacaaagatcacttctgggacccacccagggagactgttgttacgagggtggatggtgacctggtttccctcaatgctgccacctcccttctaaaacacactgacttgctaagaaaaggggggactgactccaacaaaggacagacccgacccctatcgtgcctatgcaattcagaaaacggagaattcggaggctccagcaagcagtttattgggagttgagttcaccttgccttgtgatgtgaagcaaggtagttccatggcttgtgaaccctgacaccagcacctcccatacacaacagagctggagcgctgcagggtgggtccttttccaagaagagctaagtgctagtcttagcgggaggctaggaaaccagtcctggagcaggatgcatgtgacatgcactgacgtgagaaggccggagcatcatcagtgcatatgccgctgaatatctcagggtagaatgtgccagaaaacagggaaagcaagttaggggaggtaagaattctgagtgtcctacagctaagacatggcagagtgtgtctgtgactccactagcagttttgagattattctgactgtggtggttggtgcagggctggtaaccgcaggagagtggatgctgtgtggtcaaggggtgtgtgtcccatgatacaggctctgcttcttcagtctctcacctcagagccacctgcggttgccacagagaaattcagatgtgaatgtttaaacaagtgtccaaagtgtaggtttgagatgggaaatggagctggagatgacctcaaaacagccctggaataatgcaatgctgacaatgtctgtgaattaggatgtgcataggcagatcccacttggggaaaaactgtaagatgcgaacctttgtcttagaagtacagcattcccacagtctgacccgaggacactgatggaaacttaaaaggcagattctgggagtcttctcacttctctccagtcatgtgtgagagctgagggcaggcactgccctagagggtgtttcctaacttctgactggatgccacaaaaggcctgctggggcccaagtccttcttccccattcctttaattcttcctacgaagaatctcgacaatggttgcagatgtcattgaagatgttcccatattgcttacatttaagaaggtggctctccagtgtgggtggtttcatggttttaaaatgaactggaggccgggcgcggtggctcacgcctataatcccagcactttgggaggccgaggagggcggatcacgaggtcaggagatcaagactatcctggctaacacggtgaaaccccgtctccactaaaaatacaaaaaatgagccgggcgtggtggcgggcgcctgtagtcccagctactcgggaggctgaggcaggagaatggcgtgaacccaggaggcggagcttgcagtgagctgagatcgcgccactgcactccagcctgggcaaggactccgtctcaaaaaaaaaaaaaaagaactgggggccgggtgtggtggctcacgcctgtaatcccagcactttgggaggccaaggcaggtggattacctgaggtcaggagttcaagaccagcctggccaacatggtgaaaccccgtctctactaaaaatataaaaattagttgggcgtggtggcatgtgcctgtaatgccagctactagggggcctgaggcaggattgctttgacctgggaggcagaggttgcgccactttcactccagcctaggcaacagagtaagactccagctcaaaaaaaaaaaaaaaaaaaagtaaaacgaacaatttgggaggccaaggtgggtggatcatttgaggtcaagagtttaagatcagcctggtcaacatggtgaaacactgtctctactaaaaatataaaaattagctgggcatggtggtgggcacttgtaatcccagctacttggaaggctgaggcagaagaattgcttgaacccagaggttacagtgagccaggatcacaccactgcactccagcctggggcaacagagtgagacaccatcttggggtgcggcggggaaaaaaaggttgggtgctgtggctcacacctgtaatcccagcactttgggaggccgaggcaggcagatcacctgaggtcaggagtttgagaccagcctgaccaacatggagaaaccccatctctactaaaattacaaaattagccaggcgtggtggcgcatgcctgtaatcccagcttcttgggaggctgcggcaggagaattgcttgaatccgggaggcggaggttgcggtgagccgcgatcgcaccactgcactccagcctgggcaacaagagcaaaattacatctcaacaaaaacaaaaacaaaaaacaaaccccacaaaagatgggatggatatagaattttctttatagtttctctccagtatatattctcaggtgtctttaaaagattacgtgaagtgaaggctttcctacactccatacattcgtagcttttctgtccatggagtccattcacatatctgcaatcccgcaggagagtgcaagttcctcccccatttgttaaatatttcattgccgcatgagtcacgtcttcaaagggaattaggacaactgaaggcttaatcacaccgtttacattccttgaatttctctccagcgtaagtactctcatacatccaaaaggaactaatacaactgacagcattaccacactttactttcttagggcttctgtctactatgagtcctttcgtgcacgtgcaaagactttgagtaactgaaggctttaccacattgtctacactgaaagggtctttctccagtatgaattcttttgtgtactttcagggaatttaaacaagtgaaagctttgccacactgcttacactcacatggtttcactccagtgtgacttctttcgtgccttcgaaggtgactgaagtaaatgaagacccgaccacactgtttgcattcatagggtttctctctagtatgggttctttcatggattcgaaagtgagtggaataaagaaaggctttaccacattctttacattcgtaagttttctcgccagtgtgaactctttcgtgcaactgaaggtaacttgaagaattgaaggctttaccacattgtttacattcatagggtttttctccaaaatgagttctttcgtgcacttcacaggaactagatgacttgaaggcttccccacatttcttacatgtataaggttgaactccggtgtgggttttcacgtgttttcgaaggcttgagtgagaaaagaaggctctcccacattccctacatacaaaaggtttctctccagtatgagttttctcatgactccgtaagtacgtgggacaactgaaggctttcccacattgcttacattcataaggtttctctccagtgtgagtcctttcgtgggttagaaaaggctggtaatatataaaggcttttccacactgtttacatttgtagggtttctctccagtgtgatttttttcatggcgccgaagagcagtgagatatctgaatgccttcccacattccttacattcatagggtgtctctccagtatgaattcttatatggtttcgaaaggaaaagagaaatgcgaaggctttgccacattccttacattcatagggtttctctccagtgtgaattctttcatgggttcgaatactggagctgcgagtgaaggttttcccacattctttgcatttatgtggcttctctccatattcgtgacactcatttggtttctgttcagtgtgagatctcatgtgcctattaagggagacctgatgcatgaagacttccccacacacactgcagtcacatggttttaatccagtaggagtttccaggttcgtattaagatcaggaatctggctagtgctttttccacatggacaatcttctttattttcacagagtgcttcaaccataggacttctgtaaagaatgagtaccgtattattaatagttttgtattaatgatcttatatttattagcaagtaccagaattacattttaaatattttcacagaaactgtatgttatctgccctgtctaaattgttttgaaagctaatatactcaatagtctagaacaggccgtgaccatagctattatcaaaatagttaaaaaaaaattattattattatttttgagacggagtctctctgttgcccaggctggagtgcagtggcgtgatctcagctcactgcaacctccgcctcctgggttcaagtgattctcctgcctcagcctcccaagtagctgggattgcagacatgcaccaccacgccccgctaattttatatcttttttagtagagacggggtctcaaactcctgacctcaggtgatccgctcgcctcagcctcccaaagtgctgggattacaggcgtgagccactgcgcccagccaggatttttaaatgctgtttcatagtgatttcttctcacaccctgaacatctattgcttttttttttttcctgtagagacaggttttcactatgttgaccaggctggtgttgaactcctggcctcaagcaattctccagccttcacctaccaaaggctgggattagaggtattcgctaccttacccagccaatgacagtttctgttgtttttttagacggagtctcgctctgtcaccaggctgcagtgcagtggatcgatctcagctcactgcaacctccacctcccaggttcaagcgattctcctgcctcagcctcccgagtagctgggactataggtgcacgccaccacgcccggctaattttttgtatttttagtagagacagggtttcatcatgttggccaggatggtctcgatctcctgatctcatgatccactggcctcagcctcccaaagtgctgggattacagacatgagccaccacgcctggctgcccatgacagtttcaatgaaacaccttcagtaaaaattttctaagaatgaataaacctgaaactctgcttattgttttgcttgcttggcttttgaaatttatgaaatactaagattctctcaggggctatataattatttgtgaatgcaactcaccttagatttcttccctggtttttgtgttcatcttcaatatcctggtctttccatttttcccctaaaatacaagcccagagaactcacaataaattattagaaattatagaaaattataacactctaagatccatgattagctattgattagctatgacactgtctgatctacttactaaagtattctcttcccacattttttttttttttttgagacagagtctcgctgttgcccaggctggagtgcaatggcgcggtctcagctcactgcaacctcggcctcccgggttcaagcaattctcctgcctcagcctcctgagtagccagaattacaggcacctgccaccaggcctggctaattttttatttttagtagagacagggtttcaccatgttggtcaggctggtctcagactcctgacctcttaatccgcccgcctcagcctcccaaagcactgggattacaggcgcgagccaccgtgcctggccccttcccccattttaaaccttggaactcagttgttgtgcaagaaacacctgttccctccttaattaagtagagaaattatgtcacccttacctatacaggccaggttcttgaaggttgcccgcatcacatctctgtagatattcctctggccaggatccagcaaagcccactcctccagggtgaagttcacagccacatcctcaagggagatggagtcctaaaacatcccccatgtgtgtttaggaggaggagagagattcgcagtagtgaggatccattctcagaattcctgagaaattccatataatcctgtagtctcggtttagtggtataacttggttgtcagaactcttgactctttccatactcacttcctcataaatttaacactatcgtgaacatacaaaaattattgcgctctctctctctctctctctctctctctctctctctatatatatatatatatatatttttttttttttttttttgaaacattcttgctctgtcgcccaggctggagtgcagtggcacaatgtcggctcactgaaagctccgcctcctgggttcacaccattctcctgtctcagcctcccgagtagctgggactacaggcgcccaccaccacacccagctaattttttgtatttttagtagagacagagtttcaccgtgttagccaagatggtttccatctcctgacctcgtgatccgcccgcctcggcctcccagagtgctgggattacaggcgtgagccaccgcaccctgccattatttctatattttaactgtgatcacttgaagccttattgttctttttctttttattttttttgagatggagtcttgctctgttgctcaggctggagtgcaatggtgcgatcttggctcactgcaacctcctcctcccaggttccagtgattatcctgccccaacctcccaagtagctgggactacaggcgcgtgccaccacgcccagctaattttttgtatttttagtagagacggggtttcaccatgttagccaggatggtcttgatctcctgacctcgtgaatcgcccccctcggcctcccaaagtgctgggattacaggcgtgagccaccgcgcccggccaccttattgctctttaaatacagacccaagaccatcttggatatatgagagaaatgctgtacaaatgaaacaaattgtaagatcatcaattcctcgtgagaaaaactctttcattttctaccttattacatactgtaccactcagcatttcatgaaacttggggtcaaatctggatgagattttaataaatgaatacaccctttagactataagctgcacatctcccattgaggatgaaaaactgtgtatttttctttttcataaacaacatgagagatcaggaagtctgtgaaaagccagaagtcactggccatgttgccctgaaggatctcgggccattagaaccatgcaaatccaggtggctgaatgaaaatattcttctgcattagtattaatttcaacgtgtttgtgtaatatttatcataggttcagtttttcctttctgtctcatttcatgggtctaggaggttattggaaagaaagcacagcaacttggacctctataaacccctgtactcatgaaggtttattactcgcatgcttgagctctcaggcaaagctgtgtaactctcaagcacttgtgaagtggcttcggagagcaagaaaaggagcctggctggggatttttactgacattagggagtgggctagtgtgagttcaagcatacaggtggaggctgatgcgaattggctctgtcgccagcaccaaatgagggtgacccaggctttcttcctaccacgtccatatgtggggtacacagtggaaactgaggaatgaggttttaaagctgtgagcagtcaaaagccaggcggggtggctcacgcctataatcccagcactttgggaggcagaggtgggcagatcatttgaggtcaggagtccaagcactaaacctccagccctttttctctcccccgactttgggggctagggctagaggaagatcaagactgggtgtctttcgggacatcaatccccaccctgaagttaggtaggcattctttccagtagtcatttatttacaacaagagagggtccattacccttatcactcatgaaattccaagagatttaggaactctgtactaggaaccacacacaaagaccaaacaaatgtctttcttatcatagcaaagaacatcatggctcggggcacaggctcaccagaagacagatgattcataggattatatcatgtttccactccagccactggtaacagtgtgacattagagttttgtttttattttgagacccagtctcgctctgtcacccaggctggagtgcagtggtgcaatcttggctcactacaacccctgcctccagcattcaagcagttctcctgcctcagccaacagagtagctgggattacaggcatacacaaccacacccagctaatttttgtatttttagtagagacagggtgtttcttcatgttggccaggatggtgtcgaactcctacctcaagtaatttgcctgccttggcctcccaaaatgctaggattacaggaatgagtcaccactcctggcctgggtttttgttttaaaacagtagaacaggccaggtgtggtggctcacgactgtaatcccagcactttgggaggcggggggcgggcagatcacttgacatcaggagtttgagaccagcctggccaacatagcaaaaccccatctctactaaaaatacaaaaatttgccgggtgtggtgggcacctgtaatcccggctacttgggaggctgagggaagagaatcgcttaaacctgggaggcagaggttgcagtgagccaagatcgtgcccctgcactccagcctgggcgacagagcgaaactccacctcaaaaaataaaataaaataaaataaaataaaacagtagaatacaatgaaacaatattctatttctttctgcatgtttcacaattgaagaaatctctagagaaccccaaaaatgacagaacacagaaaaccagggacaccaaaggcaattttatctgacacctacagttactgaaaatagtaaacacagcctaaaatcaacaggataaacctaaaccctcacatttaaagcctgtttacctcagttccttttcaacaccatgcccagatctcaacaaaaattacaagatatattaaaagacttagacggtttgaagagagagtgcaggcatcagaaccagactgagatataaaagagatgctggaattatcagaccagaaatttatttcttttcttttttttttgagacagagtcttactctgttgcctaggctggattgcagtgacacaatctcagctcactgatactgtcatagtggataaaaaagaacacctggccaggcgtggctcacgcctgtaatcccagaactttgggaggccgaggcaggaggacctcttgaggtcaggagttcaagaccagcctgaccaacatggagaaaccctgtctctactaaaaatacaaaattagtcaggtgcagcggcacatgcctgtaatcccagctactcacgaggcaggagaatcacttgaacttgggaggcagaggttgcagtgaggcgagatcgcgccatggctctccagcctgggcaacaggaataaaactccatctcaaaaaaaaaaaaagaaaaagaaaaaagaatacctaatatatgttgtctgcaagaaattcgcttttttttttttttttactttgttttttagagacagggccatgctctgtcacccaggctggagtgcagttgtgggatgacagatgactataacctcaaactcctgggctcaaaggactctcacctcagcctctgagtagctggaactacaggtgtgcactaccatcccttgataattttgtttctttttatagagatggggtctcactatgttgcccaggcttgtctcaaactcctggcctcaagcaatcatcctgcctcagcctcccaaaatgctgggattacaggtgcgagccaccatacctaggccaacaaatccactttaaatatatcacaaagattggggggaggggggagggatagcattaggagatatacctaatgtaaatgaccagttaatgggtacagcacaccaacatggcacatgtacacatatgtaacaaacctgcacgttgtgcacatgtaccctagaacttaaagtataataataaaaagtaataataaataaatatatcacaaagatatattaaaaataaaggaatagagaaagatatactatgctaacactaattattattattattattttgagacaaagtctcactctgccacccaggctggagtgcagtggcgcaatcttggctcactgcaacctccacctcccgggttcaagcgattctcctgcctcagtctcctgagtagctgggattacaggcgcacactaccacacccagctaatattttttgtttgtttgtttgtttgagtcgaagtttcgctcttgttgcccaggctggagtgcgatggcgcaatctcggctcgctacaacctccgcctcccaggttcaagcgattcttctgcctcagcctcctgagtagctggaattgcaggcacctgccaccacgcctggctaatttttgtatttttagtagagacagggtttcaccatgttggccaggctggtctcaaactcctgacctcaggcgatccgcctgcctcccaaagtgctgagattacaagcgtgagacaccatgcctggtcaatttttatatttttagtagagatagggtttcaccacgttggttaggctggtggcaaactcccgacctcgtgatgtgcccgccttggcctccctaagtgctgggattacaagcatgaaccaccatgcccggccaacactaattttttaaaagctggcacagccttattaatttcagaaaaagctgacttcatagcatgaaattatcagtgatagaagggcattacatactgacaaaggggttaattcaccaagaagacaaggcaatccttactgtgtatgtacataaccacagagtggcaaaatatatgaggggaaaactaatacaactgcaggaagaaatacatgaattcactggtacagctgtatatttcaataacccccagcattaatttagagatccagcaggcagaaatcaggaaggacataattaaattgaacagcaccatcaaaacaactggacttaattgaaatccagaataattcattcagtaacagcagaatatacattcttctcaagttcacatggaatattcaccaagatatctcacattctggtaaataaaatacttcctagcaaatttaaaagactagagaatacaaaacatgttctcagatccagaattgataacagaaagatagcttgaaaacccacaaatatttggatattaaatcctgaacttctaaataatgcatggatgagaaaagtctcaagatattaaaaattattttgaattaaataaaaatagaacttatcaaaacacgtagaatgcagcaaaaggagtgcctggctgaaatgtagacgattgaacacatataccaccaaagaatgatctgtaatcaataatctcagtgtctaacttaaaaaactaataacaggccaggtatggtggctcacgcctgtaatcccagcgctttgggaggctgagtcaggcagatcacctgaggtcaggacttcgagaccagcctggccaacatggtgaaaccccatctctacaaatacaaaattacaaaaatactctctcatgtactctaaaatacaaaaattagccaggcatggtggcacaggcctataatcccagctacttgggaggctgaggcaggagaatcacttgaacccaggaggcagaggttgcagtgagcccagatcgcgccatcacactgcagcctgggtgacagagcgagactctgtctcaaaaaaaatagatagagaaaaaccaacaaaaccaaaaggtggtcttgtgaaaatatcaataattaactgaaaaatgtctcctcaagctagctaacaacaaaaagacaaagattgttaatatgacgaaagggggaaaatgaagaagcacttgacaaaattgaacatctatttatgatagcaaactaggaatagaagggaatttcttcttcttcttttttttttttttttttgagacaggtctcactaaattgcccaggctggagtatattggctattcagaggcgccgtcatagtgctatagcctcaaactggtgggctccagcaatcttcttgccttggccccgcaagcagcaaagactataggtgcatgccactgcatcgggcaagaggaacttcttgagaaagtacatacaagaaacctgcagttaacatcacgcttaatgtgaaaaactagatgttttcccagtaatatgaggaacaaggtaagaaagacccttctcacactctcaccattcatgtatgtatgtatgtatgtatgtatgtatgtatgtatgtatttatttatttatttatttagtgagagagtctcactctgtcacccaggctggagtgcactggcacgatctcggctcactgcaatctccgcctcctgggttcaagcaattctcctgcctcagcctccggagtagctgggattacaggcatgtgccaccacgccccgctaatttttttgtatttttagtagagacggggtttcaccatattgaccaggctggtctggaactcctgaccttgtgatacgcccgtctcagcctcccaaagtgctgggattacaggcatgagccaccatgcctggcctttttttttttttctttgagatggagtttcgctctgttgcccaggctggagtgcactggtgccatctcagctcactgtaaccacctccacctcccgggttcaagagattttcctgcctcagcctcctgagtagctgggattacaggtgcacccaaccatgtccagctaatttgtatatttttagtagagatggggtttcaccatgttggccaggctggtcctgaactcttgacctcaatgatccccccaacccctgcctcggcctcctaaagtgctggattacaggcatgagccaccgtgcctggcccctctcaccatttctattcaatattgtacaacagtgaaactaagaaaaagaaaaagaaataaaagatataccaactgggaaggaagaactaaagctgtctatctgcatatgacatgactgcgtatgtagagaatttcaaaaatctacaacaaagaaaattcctggaaccaataagagcaaggttgaaggacacaagctcaacatataaggccaactcctttcctacacagccacacaaatatagtcaactgatctttgatgaagaaccaaaggcagctgggtgtggtggctcacgcctgtaatcccagcactttgggaggctaagatggggtggatcacttcagcccaggagttcaagaccaatgtgggcaacataacaacactccatctctatttctttaaaaaaaaaaaaattttttttaaataaaagaaaaattaaatgaaaatagatcaaagatgtaactgtaaaatacaataagactcctagaggataatatataaaatctagatgaccttgggtttgatgatgaattataacataaattataagtttgacttcattaaaataaaaaagtcctgctctggggccgggcacggtggctcatgcctgtaatcccaactctttgggaggccgaggtgggcggatgacttgaggtcaggaatttgagaccagtctagccgacatggtgaaaccctgtctctactaaaaatacaaaaattagccaggtgtggtggtgcatgcctgtagtcccagctacttggcaggctgaggtagaataaatcgcttgaacctgagaagctgatgttgcagtgagccgagattacgccactgcactccagcctgactgacagagactccatccccgccgcccccccaaaaaagagtcctgctctgggaaagaccatgttaagaaaatgaaaagacaagctacagacagggagaaattctttgcaaaacacctatctgacaaaggactgatattccaactactaaaagaactattaaaactcagtaacaggaagacaatccaattaaaaatgggcaaaagatatgaacatacacatcaccagagaagatttagagatggtaaagcagcacatcaaaacatgctcaacgtcacacagcattagggaataaaaaaaaactaagataaataaaactgagtaagatattaccacactcactaaatggctaaattttaaaacactaaaaacaccaaatgatggtgaagatggagaacaataagtatcatcattatttgctgctggcaatggaaaatgatactcccactttgaaaggcagacagttacaaaaaaaaaaaaaacacactcttaaattgtaatctagccatcatgctcctaggtatttactaaaaagagttgaaaatttatgttcatgccaaaacctgcacatgaatgcttatagttttattcaaaaccttgcaaaccttagagtgaaccaagatacctctcaatagacaaatggataaaccatctggttcacctacagaatgataaaaagaaatcaggtatcagctgggcgcggtggctcacgcctgtaatcccagcactttgggaggccaaggagggcagaccatgaggtcaggagatcgagactatcctggccaacatggtgaaatcctgtctctactaaaaatacaaaaattagctgagtgtggtggcgcttgcctatcatctcagctactcgggaggctgaggcaggagaatcaggtatcaagccatgaaaagacatggaggctaggtatggtggctctcacctgtagtaccagctactcagggcactgaggcaggaggatcacttgagtctgggagttcaagaccagcatgggtgttatgatgagaccccatctcaatttaaaaaaaaaaaaaagacgtggagaaaccttgacttgaacatatattattaagtgaaagaagccaatctaaatggttatatactgtgtagtttcaaagatgacattcaggaaaaggcaaaattatgacagagtaaaaaggcttttgactgtcaagaatttgggaagagggagggactaatgaataggagaagcacaggggatatttaggtgagggaaagcatcctacatgatgcagctatgatgaatagcagttattatacatttgccaaaacccacagattgtataacagagtcagccctaatgtaaactgtggactctgaggcatcaatattggtacatcacttataacagatgtattaaagtaatagaaaatataaaaaggataaactatgtggaggcagagggatcaagtgggaacactacactttctcatcaatttttctgtaactctgaaatagctctacaaaaataaagtctactagaaaaagaaaaacgatgaggacaggctaatgacaattcacaccatgactggttgatgaatgaaacatacaacctttcactcaattcatgaattttattttagtaagcctttatggtgcttcgtgagccagagactggtaaaggcaatgaaagttccacaggatgccttgttcaaaagcccatcactctctattttgagaagtgaaataagagctttgattagtatcagtagtgtccggaactcttgcacgaatatgagtgtccaggcggagccttggattgtgggattaccctctgtagaggtgtgtattatcttgacttatatggctagccgtgaggtaaaaaaagattcccagagttttgtgggtttttttttttttccctttgagatgaagtctcgctctgttgcccaggctgaaatgcagaggcgcaatctcggctcactgcaacctccgcctcccaggttcaagcgattctcctgcctcagcctcctgagtagctgggattacaggcacgagccaccacacctggctaatttttttgtatttttagtagagacggggtttctccatgttggccaggctggtctcgaactcctgacctcaagtgatccacccgcctcagcctcccaaaatgctgcaattacaggcgtgagccaccacacccagcctaatattcccagagttcttttactacaaaggtgcaactcttagacaatcactcaagagtgtgtaaacatgtgcagatgggatttattgttggccactgctaagatgactaactgatgaactgccccttgaatctagtcctttattaggtccatttcaattaagggataaaaagcagcagctccaacatgtacaaatgtggccatgtcagccatcaagtctacacactcgccactgctgttcactcagtagcaaaggatctaggagaaggtagacctcctccagcaccatgacatctggcaaggaagaaagaaaagaagtcaccctcccaccccaactcctgcagagaggatatgctgaaggctaacatttgactctgtaattttgaaaggaggtctgtgtaggttgctgtttctaggacccatggcaaaatgagcagttgagtagagtcacatgcccagggcccaggagagcctcaatgttcaggataacctagtacaaggtgatcattgcagctctaatggcatatagtgtggggccaagggctgtttcttgcatcagagccctatggacaacttatggtcatcatggataattacaagaggcatgagaggaggtttctaaagccactatagtggccaggaatggtggctcatgcctgtaatcccagcactttgggaggccatggcaggcagatcactggaggtcaggagtttgagaccagcctggccaatacggtaaaaccccgtctctactaaaaatacaaaaattaactgggtgtggtggtgcacacctgtaatcccagctactctggaggctgaggtaggagaattgcttgaaccagggaggcagaggttgcagtgagccgagattttgctactgcactccaacctgggagacagagcaagactccatctcaaaaaaaaaaaaagaaaagaaaagaaaaaaagagcatctatagtgctctggaggcactaacaggagtgcctgccatatggcaacttaaacagtgtctagagcctctgtggtagcgatatccgggcaatgatgaccaatttgcaagtcacagcataaatgggcttaagtaaactttataaaggactgtgttacctcctgaacatcaaaaaagcccaaatgatgttgtgggtgccaacaggaacaacagcagtaggcagaggttgcagtgagctgagatcacaccactgcacttctgcctgggcgacagagtgagagtctgtctcagcactcccacctgggcaacagaggaagaagactccatcaatccatccatcaatcaatcagtgtaccttgcttacatttagtgggatctccagatatagctgattcctaggattgattaatcccatgaatgattgtcagttagtgcattacagagatgttaaaattaattcagaactaggctgggcctggtggcttattcctgtaatcccagcaccttgggaggccaaggcaggaggattgctagagcccaggagtttgaaaccagaaatatatatatatgatttaaaaaataataaaattcagaactaatgtcggagaggcctgaaagccaagcacatgcagtgtccttttctctctctttttttttttgagaccgagtttcgctcttgttgtccctgctggagtgcaagggtgtgatctcggctcaccacaacctccgcctcccgggttcaagaaattctcctgctccctagtagctgggattacagccatgcaccaccatgcccagttaattttgtatttttagtagagaagggggtttctccatgttggtcagctcccgacccgcctgtcttagcctcccaaagtgtttggataacaggtgtgggccaccatgtccagccttttttttagttgcataattcttttactatattttggagttgcaattaggtcaaaacctagaaaaatgcttcatttttttttcttttgtgcccttccttctttaatctttctctgttttgtttctgtggtcacttgatatgcttccggttatcttcctaccttaatatttattaatatatttttttcctccagaaaacctcaaattgtaggttatgggcctcacccatggaactggtggcattaaaaggtttcagggctgggtgtggcgactcacacctgcaatcccagcactttgggaggctgaggcaggtggatcacctgaggtcaggagtttgagaccagcctggccaacctggcgaaaccccatctctactaaaaatacaaaaatcagccgagtgtgttggcaggtgactgtaatcccagttacgcaggaggctgaggcagggagaattgcttgaacctgggaggcagaggttgcagtgagccaagatcatgccactgcactccagcctgagcaaaagagcaagactctgtcaaaagaaaaaaagaaaaagaaaaaaaggtgatttgggccagcgcagcagctcacacctgtaatcccagcacttcagaaggctgaggcaggcagatcacttgaggccaggagttcgagaacagcctggtcaataagatgcaatcccatctctactaaaaatacaaaaatgggccgggtgtggtggcacacgcctgtaataccagctactcaggaggctgaggcataagagttgcttcaacctgggaggcaggggttgcagtgaactgagatggtgtcactgcactccagtctgggcgacagagaaagactccgtctcaaaaaaaaaaaaaaaagtgatttgatcaaggaatccaagggaaagaaacgcaaatgttttaatctgtttagataaggaattgcttctccaccgttaaaatggaaaactcacaatcgaaaggtaaatacattcacaagggccaggcatggtcacgcctataataccaacattttgggaggccaaggcaagaggatcccttaaagccaggcgttcaagactagcatgagcaacacagcaagaccctgtatctacaaaataaaaatttgaaattagccagtagtggcagatgcctttagtcccagctactcaggaggctgaggcgggaggatcgcttgagatgcagtgaggtttgatggcgccaccgcacttcagcctgggcgacactgcgagaccgtgtcaaaaacaaacaaattcccaaacttgagagcggtagcccagacagtgggtcagtgcctggtgatgacagcaggggcatctgagcagccacaggaacgaactctgggagctccacacgccctcctctcccctagctgcaaaaaaaatgttccctcctccaggcttcaattctcacaggtggattcaccttaatgttctgacccaaatggattctcaaacacacgagaatccgtcatgactttcccgtggcccctgcacaatcttcggagacgcggggctgggggcgcccagctgcccggaaagggctccggggccggggccgcaatcgcagggacgggacagaacgcctgaggtcccagctgccggcccagccccacgctgctgggagaccctcgggtcagctgcgccagggggactcgggtcttcccatagccggttccgacaagtcccctcctcaggtctcgggactcccggccccgcacactcaccatttctcggcttacggaggctccaggagtcctccctacggatccctcactacctgcaggtcccagtgagacaaagcatacgcagagccacagacagtccgaggctgggacgcaatcctagcgaaccgctagaataaggatgttcacacgcgcattcagagctagggtgcaagcgccttttcaacaccgatgctgactggacagtttgtgtgcccccgccccctgacccctgagtgacagccatgcaggagggcacgtggttgagccgagctagcttcccagagtgggttttcccggcggggatatttgcatgtaagaggaatttgttctttgcccgaggtccatttttaagtggcctattcagtagtgttaagtgtagttacattgtgaaaccaatctctagaactgatttaatcttgcaaatttgaaactctttattgattgaataacatcccatttaccgctcaccctcagcccctgacacctactattcgactttttgattgtgtgaatttcactgtgggtacctcatataggtggaattattctgtatttgtccttttccgactgacttatttcacttagcataatgtcctcaatcttcctgatgttgtagcatgtgtcagaatttacttccttttaagacatttaaaggccaggcacgttggctcaagcctgtaatctcagcacttcgggaggatcccttgaggccaggattttcacaccagcctgggtaacactgtaagaacccgcctctacaaaattaaaaattaaaaattaagaaatatagattccggccgggtgcggaggctctcgcttgtaatcccagcactttgggaggccgaggcgggcggatcacgaggtcaagtgatcgagaccatcctggccaacatggtcaaaccctgtctctactaaaaatacaaaaattagctgggcgtggtggcacgcgcctgtaatcccagctactcaggaggctgaggcaggagaatcacttgaacctgggaggcggaggttgcagtgagccaagatcgcgccactgcactccagcctggtggcagagcgagactctgtctcaaaaaaaacaacaattaaaaaaaatagctattgcaacagaagctactcaggattttaagaaaaagtgtggtttagacacttagaaatgtctttgggaaaaaaaattgttaagtgcactgtaaaagcatcacatgatctagcctcataataattctcccctttttttttggaggcagagtttctctcttgttgcccaggctggagtgcagtggcgtgatctccgctcaccgcaacctccgcctcccgggttcaagcgattctcccgcctcagcctcccgagtagctggaattacaggcatgagccaccacgcccggctaattttgtatttttagtagacacggggtttctccatgttggtcaggctggtctcgaactcccaaccttaggttgggatctgcccgcctcggcctcccaaagtgctgggattacaggcctgaaccaccatgcccgtcaataattctccctttttaaaacccaggattctgccgggcgcggtggctcatgcctgtaatcccagcactttgggaggctgaggcaggcggatcatgaggtcaggagttcgagaccagcctggccaacacagtgaaaccccatctctactaaaaatacaaaaattagctaggcatggtggcgcgcacctgtagtcccagctactagggaggctgaggcaggaaaatagcttgaacctgggaggcagaggttgcggtgagccgagactgcatcactgcactccagcctgggcaacagagcgagactccatctcaaaaaaaaaaaaaaattagctgggtgtggtggcggggtgcctgtgatcccagctattctggaggctgaggcaggagaatcgcttgaacctgggcagtgacccaagatcacgccactgcactccagcctgggcaacagagcaagactctgtctcaaaaaaaaaaaaaaaaaaaaaaagaaagaaagaaaagaaaaaaaaagagacataaagaaagttataaaaataaataagtatttttggttaaaaaaagcataaagaaaagatattttatataaaaaaggatcttgtatgatagattcttgtcctaaagaaaaatgactggttgtttaaaaagagggatgtttaggacaagtcagaaagtcaaggcatatcatagagtgtaagtcatgaaagaatttatgaaagggaacttatggaagaaatgttgtagaatttaaaggtgtttaggcctcctgaatgcttcataaaatgccattatgactcttaactgtacaactgcctgctttacagctagggaaggcctgggacacaagaagttagatgctagaatgagtcagaccttatctgcacttctgtctaggtcctaggctccccacctggtccataattaaaatcacttaccaggtttttcaccaaaagtaaaagttgctaagaatcaatattgtaacatgtaattgagactactggaaaaaacagttttacatgcaaggtgtgtaaggaaagtagagtatacttttggtaaaaagattataagaaggcatgggaatgtggattttttttgcctaaataaaaggttaatggattaaattagataaaataaagctgaaagtttaagcaagttgtggaaggttgattgtaaaagaaattctgtgtgtaaacatattggctaaagttaaagggggtattatccagtttttctgtaaattgaatattaaaataaaagcacaacggctttcttttagaacactaacctgctctttaacaaaaattgtaaagggtaataaaaaatctataaaaattgccaaacattggcgtaaatatgtctataaaattgggtaaatatgtctataaggttttattaagaattgggtttaggccaggcgccgtggctcacgcctgtaatcccagcactttgggaggccgaggcgggcagatcacgaggttaggagatcgagaccatcctggctaacatggtgaaaccccgtctctactaaaaaaaaaacacaaaaaattagccaggcatggtggcgggcacctgtagtcccagctactcgggaggctgaggcaggagaatggtgtgaacccaggaggtggaagttgcagtgagccgagatgtgccactgcactccagcctgagcgaaagagcgagactctgtctcaaaaaaaaaaagaaaagaaaagaattgggtttaacagtaatagtatactaatgtaaatgtgaaatttggcttatttggtacaaaaatcatagaggaagcaaagtcaaatataaaatggagtatggctttctttggactatatctgtatatatatgttattggtatgtgttccaaaatgatggaaaactcttgtaattctgatatatcagtgtatgttatcagtaataattataattattatgttaaattattgtgtgccacagagtaacagatttccttgtcaattgtgtctttagctatggctaccctaaaactttgtcatccataaataattgttgtcttgtcttggtcctctttagaaggtggttttataatcagctataaagctctaacaggtgctcttgaatgcaagttttagataactttggagattgtgacatcagaatagagaaaaaatgttcaggactcttgtcctagcactttgggaagccaaggtgggtggatcacttaagcccaggagttccagaccagcctggccaacatgacacaacctgtctctccaaaaaatacaaaaattagccaggtgtggtggtgcacgcctgtagccccagctacttgggaggctgaggtgggaggatcctttgagcctggaaggcagagactgcagtgagctgaggctcacagctttccagtcagggagacagggtaagaccctgtctcaaaaaaaaaagaaaaaaaaaaggccaggtgcgttggcttacgcctgtaatcccagcactttcggaggccaaggcgggtagatcacgaggtcaggagatcgagaccatcctggctaacacggtgaaactccgtctctactaaaaatacaaaaaattagccaggcgtggtggcgggcacctgtagtcccagctactcgggaggctgaggcaggagaatggtgtgaacccgggaggcgaaggttgcaatgagccgatattgcgccattgcactctagcctgggtgacagagcaagactccgtctgaaaaaaaaaaaacaaaaacaaagaattggggtctcactctgtcacccaggctagactagagtggtacaatcatagctcactgcagccaaaactcccaggctccagcaatcctcctccctcagccatcaagcagctgggactacaggtgtatgccacaaacctggctaatttttttttataagatatgaggttgcactatattgcccaggctggtcttgaactccaggactcagatgatcatgccactgtgctcggcccaattttattattttttgtatgtctatccaactgtcacaacaccaatttatgaaaataatattctaggccaggtgcggtggcataggcctgtaatcccagcactttgggaggccaaggcgggcggatcacgaggtcaggagatcgagaccatcctggctaacatggtgaaaccctgtctctactaaaaatacaaaaaaaattagccgggcttggtggcaggctcctgtagtcccagctactcaggaggctgaggcaggagaatggcgtgaacccgggaggcggagcttgcagtgagccgagatcgcaccactgcactccagcctgggcgagagagcaagactctgactcaacaaaaaaaaaagaaaaaagtaaaaaaagaaaataatattatttcccgattcctggcaccgtttttgaaactcagttcactatatacacacacacacacacacacacacacacacacacacacacacacacacatatatgggcctatttctggaatttcaatttcatgccattgatctctatgtctgaattgcctcatgtatttgatatgaaaattttgctgctactggagactgggtgacataaattaaattgtatatcagaaaacctttggctggcgcggtagctcccgcctgtaatcccagcactgcgggaggccgaggcaggaggattacctgaggtcaggaacttgagaccagcctggccaacagggtgaaaccccatctctaccaaaaaaataaaaataattagttgggcatggtggcaggcacctgtagtcccaactatgtaggaagctgaggcaggagaatcacttaaacccaggagacaaaggttgcagcgagccgagatgatgccactggactccaacctgggcaatagagcaagactctgtctcaaaaaaagaaaaccactgaggtcttcctagagggtaatggtcatctacacagtgcagcccatcatgtatatttctttttttttttttttgtcgagacaaggtttcactatggttatgcaggctagagtacagtggtgtgatctcggcttactgcagccttgacctcccaggctcagatgattctctcacctcagcctcccgagaagctgggcctacaggtgcgcaccaccacgccgggctagttttttgtatttttagtagaaacaaggtttcgccatgttggccaggctggtctcaaactcctgggctcatgcaatccacctgcctcagcctcccagagtgctgggattacaggtgtgagccaccacacctggccccatcatgggtttttcttatgtgcagagtacttattcaaatccacagtgatttcccagttgacacacagacaagaactatggattcttagagaatatccaagttataattgaatcaaactgcagagagagggtatcattttgagtaccaccccccagtttggtggaaaagaaagttgtgatattgtgaaatatataatttgggttttgtccagggttcctggctcacagttgctaaaaaccttgtaatttcctaagcgactagagcaattggagtatcttttgttaaaatatttgggctgcctgtaatcccaccatgttgggaggctgaggcaggcaggatgcttgagcccaggagttcaagaccagcctgggcaacacagtgagatcctatctctacaaaaaatacaaaaattggccaggcataggggtgtgtgcctatagtctcagctacttgagaggttgaggtgggagggtcacctgagctcagggaagtcaaggctgcagtgagctgtgatgacaccactgcactccagcctaggtgacagagtaagactctgtctcaaaaaacaaacaacaaaaaaaaggctgggcgctggggctcacatctgtaatcccagtactttgggaggccaaggtaggtggatgcttgagctcaggtgtttgagaccagtctgggcaacatggcgaaaacccatctctactaaaaatagaaaaaaatagccagatgtggtggcgtgcacctgtagtcccagctactcaggaggctgtggtgggatcattgcttgaacccgggggtggaggctgcattgagccaagattgtgccactgtcactgggtgacagagtgaaggagaccctatctcaaaaaaaaaaaaaaatggccttttgtattcagttcttaaaatagctctagaagagttccagagtgacaggtggaagaaatgtctttagttattcataaccatcccctttccaccacagctaagtttatgttaatggggtgatttttggaaagctcctacaaaccacaggatgtgaggctagttgccagggaaccaaccatgtgactggagctttgaaactttcagctctgtccccacctccagggagggaagagaaaactgaaggttgagttgatcacccatagtgaatgatgtgattaatcatgtcaccataataaagccaccataaaaacccaaaaacacggctcagagagccttctggttggtaaataagaacataaccatatgcctggaggtatctcttcatctggctgttcattcgtatcatttaaaatatcctttgtagggccaggtgtggtggctcacgcctgtaatcccagcactttgggaggctgaggcaggtggatcacttgaggtcaggagttcaagaccagcttgaccaacatgatgaaaccccatctctacttaaaatacaaaaattaggccaggtgcagtggctcacacctataatcccagcactttgggaggacaaggtgggcggatcatgaggtcaggagttcgagaccagcctggccagcatggtgaaaccctgcctctactaaaaacatagacacacagaaaaaaaattagctgggcatggtggcatgggcctgtaatccagctacttgagagactgaggtaggagaatcacttgaccctggtaggcagaggctgcagtgagccaagattgtgccactgcactccagcctgggcaaaagagtgagactctatctcaaaaaaaaaaaaattagccaggcgtggtggtgggcgcctgtaatcccagctacttgggaagctgaggcaggagaattgcttgaacctgggaggcagaggttgcagtgagctgagatcgcgccattgcactccagcctgggcgacaagagcaaaactccgtctcaaaaaaaaaataataataataataaataaaataaaatatcctttgtaggctgggtgcagtggttcacacctgtaatgccagcactttgggaggccaaggcagatggatcacttgaggtcaggagttcgagaccagcctggccaacatggtgaaaccccttctctactaaaaatacaaaaatagctgggcgtggtggaggatgcctgtcattccagctactcgggaggctgaaacacgagaatcatttgaaccctggagatggaggttgcagtgagccaagatcgtgctgctacactccagcctggcaacagagtgagaccctgtctcaaaataaagagtaaacaaataaataaataataaaatatcctttgtaagactaggcacagtgactcactcctataatctcagtgctttgagaggagcgaggtgggaggatctcttgagacctggaggttgagactagcctggacaacagagcgagaccctaactttacaaaaaataaataattagttgagtgtggtggcacatgcctatattcctagctacttgcggggctgatgagggaggatcgcttgatcccaagagttgaaggctgcaatgagctatgatcctgccactgcactccagcctgggagacagagtgaaaccctgctctattaaaaaaaaaaaaaacactttgtaataaatgggtgaatgtaagtaaagtgtttctgtgagttctgtaggctgctacagcaaattaatcaaacccaaagagtgggtcatgaaaaccctgatttacagcttgttggtcagaagcataggtcacatcctgggacttacaactgacatttgcagtgaggggcattcttgtgagccgttagcttttggtattggactccgtctccaggtagatactgtcacaattaaattgaattatatagcacacccagctggtgtctgcttgagaagtggttattggtggaccagaagtgaagtattctgttaaatattttgttaatggttttcctatccctttaagaaaagtgtatttgagaccctcgaataggatttttttttaatttaatttttttttttgagacagagttttgctcttgttgcccaggctggcgtgcaatgatcttggctcaccgcaacctccacctcccgggttcaagcaattatcctgcctcagcctcccaagtagctgggattacaggcatgtgccaccacgtcccgctaattttgtatttttagtagaaacagggtttctccatgttggtcaggctggtctcaaactcccgacctcaggtgatccacccacctcggcctcccaaagtgcagggattacaggcatgagccaccgcgcctggcctaaaataggattttttttttttttcattttagagacagagactcactctattgcccaagctggagtgcagtggcacaatcataggtcattgtagcctccaactcttggactcaagggatctctgctatgggactacaggcacatgccaccaccctgggtaattctttttttttttttttttttgagacagggtctctatctgttgcccaggctagagtgcagtggcatgatctcagctcactgcaacctctgcctcctgagttcaagcaattcttctgcctcagcctgctgagtagctgggactacaggtgtgcaccaccatgccccgctaattttttgtattttagtagagatgcggtttcgccatgttggccaggctggtcttgaactcctgacctcaagtgatttacccacctcagcctcccaaagtgctaggattacaggtgtgagccactgcacctggccaattttttttatttttatagagacaggatttcactctgttgcccaggctttgatgtccttttataaaaggaatcactggaagatttttattttaatgatcagcaaaggcctaaaagtccatgaccattcacaagtatcatttccatatggtagatttccagcacatgttaggaaagaaaaaaaatgaacagctttgtgttttactaaagaacaaataaaatcccatttttattcaatatttcaataatttatgtttgcacatcactgtggtgactaatgtgatttcataatcattagtatttcatttgattagccccacccaatcatacctcccatcttgcaaatgaaaaaagttaagtatggagagcacaaagtcttgtctaaactcatatggctcataagtaataatgaaattggccaggtgtggtagctcacgcctaccatcccaacactgggaggctgatgtgggaggatcacttgagtccaggagttcaagatcagcctgggcaacatagcaggaccctgtctctaaaatttaaaaaatttaaatttttttttttttttgaggtggagtctcactctgtcacccaggctagagtgcagtggcatgatctcggctcactgcaacctccaccttctgggttcaagcaattctcctgcctcagcctcccaaatagctgggattacagatgtgcacaaccacacctggctaaaaaaagaatttttttaaaattagccaagcgtggtggcgcacacctagtcctagttccagctactagtcccagctactagggagcctgtgaagttgagtctacagtgagctgtgatcttgccactgcactccagcctgggtgacagaacataatagtaatagtaatacaatataataacagtaataataatggaacttctcagtattaaagtccaaatgtgtgccaccacatatactgagcactgtcaaaaactgaaaactcaggccaggcatagtgactcacacctgtaatccctgcactttgggaggttgaggcaggagaattgcttgaagccaggagcttgagaccagcctgggcaacacagcaagatccctgtctcaaaaaaaaaaaaaaggaacaaacaagaacagcatagcatctgcagacagagaagcagcagcaaatcagtggaggccaggattgatagcttccccatttcgggttttggtagacaggaaggacggtgacccagacactgaaaaataccagcatgctgaacttaaggattggcttattgaaaatgtcaggcaagttcctggccagaaaagccacattgaagctcccatgagccaaggaacccaggattcacagaacagtcaataaccaaatcgtggttttatgtgaagatgacatattcaggctcagattatgtatccacatgcatgaaggctgtagtcattccccatgaaattcctcccacttcagcatcccaaagtgttgggattacagagtcacttagatcagggaactgatagcaatgacaaaattaggtacccccgacactaacccgtgccttatccgtctcttgcatgtttaccttgaaggtcagaactgcagtgatcgttttgtccaaactatgcaaacaagtaaacatgactccaaatttgtggtttttgtgtttttttgagacagggtctcgctctgttgcccaggctagagtgcagtggcaccatcacaggtcaccgcagcctcaggttgaagccatcctcccgtctcagcctcccgaggacctgggactatgccaccatgcccagctaattttttatctttatttatttatgtatttatttatttatttatttatttatttttgagacagagtttcactctgttgcccaggctggagtacagtggcgcgatctcagctcactgcaacctcctcctcccagattcaagtgattctcatgcctcagccacccaagtagctgagattacaggtgtgcctcccaccatgcccagctaacttaaaaaatatttttaatagagatgaggtttcagcatgttggccaggttggaaaccaactcctggcctcaagtgatccacccaccttgcctcccaaagtgctgagattacaggcatgagctactacacccagccattttttttattttttgtagagacagagtctcactacattgcccacactggtctcaaactcctgaactcaagcaatcctcctacctcagtctcccaaagtgccaggattacaggcatgagccactgcacccagcccaaatgtgatattccaaaggatgcaggtggctgtgttgggatggccaatgaaggtaagggacaatggaagtacagggtgagggcaatgaacaggacatacctgagagcctggttattggccttgactatgggagtgccttcacaaagacccgaaagacccccccacaaagaggtcatagaaggacagacccaaatggtcattataaacaaggaaggtagccacgctgacaggtagcgatctcacttacagtttgagtcttgatgctttgtccatggtgttcactgttctgcatctaattagaaacaagaggatgcattttgtgagtttcagcaatttagaactaaacatgacctttgacagccttggaagcattgttccccctgcatctacctgtacacacagagctaccagaagggtggatcatgggagttttcaagattacactgtctcctctataatgggaaaaatgaaatatgtttctactttaaaaaaaaaatttagagacagtctctctctctcccaggctggaatgcagtggcacaatcttggctcactgtaacctcaaactcttagccttgagatccttctgcctcagcctccgaaggagctaggactacaggtgaacaccatacccagctaatttttaaaaattttttgagaaatggggtctcgctatgttgcccaggctggttttgggctcttggtctttccaagttctgtagggacactttagaaaacttatttgagataaatttccttccactttacagcaacacggatggaactggaggccattatcctaagtgcgatgatgcaaaaacagaaagtcaaaaactgcatcttcttacatataagtgggagctaaacaatgggtaaacatggacatacagaatggaataatagacactggagatgccaataggttggacagagaggggggatgagggatgaaatattacctattgggtacaatatacactctttgggtgatgggtgcactaaaagccagacttcgccactatgaaatatatccacgtaacacaagtgcatttgtaaccataaatctacaaaaataaaaataaaaatgaaaagcaataaaaacatgcttaaactaaaaacaaacaaacaaaaaaacaacgaaaacaaaccatttccttccagagtaaaacgcagtttactgagcacgtctcatagatcgtgattggtctgaagagtccctgtgcccaggttagggttgcaatttaccacccgagccaagtgctcgggtgtcctacggattgttttttctttctttcctttttttttttttcttgggatgggttctggccatgttgcccagactgaactcaaactcctggagtcaagcgatccacccgcctcagcccacccaccccccgacctcccccaccgcccccaccacgcagtagctgggactacgggtgtgcgccaccaagccctgccttggggttccttttctaaagtgccaaatgtgtggaggtggggaaaagaaaggtggacgcctcaacgctgttatggtcaaagattaaaatgcaaccacactttttattacacatgatggggtaaccgtctgtttataaacaagggtcactattccacgagaggccttacaacattatgccaagcccctggtacctggaggacatcagaccctcctgttcctgtgcggccttgactagacgaccacttgctctggacttgctcctcgaggggtcgctccatctggaaactgagactggaattcctgcgcatccctgtccccgcatccagaaacactgcaggaagacttccgtgtccgacccgagatccggaacaatttctgcttcaacacaattgtccacggagggcaccagttccgtcccaccggcggaagcgagatctgcctagctactagacctgctgcctagctgtcattcggacaaaaaggggcggggctgtataattgtccaatcaggggcggcgccggaaaggagggtacggctacgctgcgcaaatgcgtgctacgtcactgtgcgatcgggttgtgcttagcttggggtctcctggccccttgacgcgtcaggttgctgtacccctgcatcggatgcgctgtaccctgcgctggctccgtgaaccttagggacaacaccgggacacccgcgaggccggaaaatggtgagtgtgcagggccggactagttggaaccggccgtgatcgcgggacccgggcctccccacggtcacctccggccgcagtgtggggctgggctggcagctggaactccaagcgtcctgtcccgtccctgcgcggcgactgcggtcccagccccggagccctctctggacaactccgcgcccgcagccccgcgtctttcccagatcgtgcagggaccacgggagggtcctggggagaatcccgccttgtgtgtttggtttgtgtgggaggagctacagtctggggttcccagtcccttctttcttcccaaaggctgtttccccctgagtcttccaaagatgttggaagcagagtctcaaatccactaccctgtccccccagcctagctcctcccacggcgggccattaatccctagatttccggatccctccccgaattcccaaacgcctacttccgctcgccagtggaaaacatcgtcaccaactctttgtcctgtgtggtgcatttcaaacacacgcagtattttaataatcttttttccaatagatgcctcttttaaacgatttatttcttgtttgtggatattttacatcagagaaaaatcagaaaaattattcacttggaactaatctgcataaaatgctgtggccctcatcctggtacctttccagggcacagacatcctatgggaactcctttgcgttgaggttcctttttgtaaactttcctgggtaatctatcttttcagcacagtttcagattggcactgtcccgccttgggtttatgaccttgaaaagatttattcactcgaatgtcatttttccaataaatataaaatatatgttatcagaagaacttgagagacagtacaaaatatttccaaagggcaaaaaagaaatgaatctcagaaaacaaaaaacatcccaatattacatttgttaaaaattctttgttctttccctgagcacatggaatatgtttctcaggtctgttcttttagtttgatgtttcagatggtattccaggacttaaacttgcaacatctagaagcattcagatagaagtaatacttttgtaaactatttattgccatggaaataattaactgacattattattttcttttttttttttttaacagatggggtctggctgtgttgctcaggctgatcttgaactcctgggctcaagcgatcctccaccctcagcatcccaaagtgctaggattccaggcatgagctactattaccggcccaacattctcattttctgaaagcaatagtgggttttcttgttaaatggcttaaaattttcttgcttccttcctttatttatttatttatttatttatttattatttatttacttttttttttgagacggagtctagctttctcgccaggctggagtgcagtgacacgatctcagctcactgcaacctctgcctctcgggttcaagcgattctcctgcctcaacctcccaagtagctgggattacaggcacaagctaccacgcccagctaatttttgtattttttttttttttttttagtagagagtgtttcactatgtttcccaggatggtctcaatctcctgatctcctgacctcatgatcctcccgccttggcctcccaaaatgctgggattacaggcatgagccaccacgccaggccttttgcttcctttatacgtaaacactgtgtttaagtaattctgctggatttttttttttttttttttttttaaagaccaagtcttgctcttttgcccaggctggagtgcagtggcacaattttggcttactgcaacctccgcacttggaagctgaggagccacaggcagatgctgttaggggaagaggggaggatgtctgaggttttaattgtggtttccttgggtgtgtttttagacattacatttgagtttcacatctgtaaggtaggtacactgagtgtaattggtgcatattgacagccattctcctgccttagcctcccaagtacctgggattacaggcacacaccactatgcccggctaatttttttgtattttgagtagaggcggggtttcaccatgttggccagtccggtctcgaactccggaccgcaggtgatccacccgcctcagcctcccaaagtgctgggattataggtgtgagccatcgtgccaggccttctgctggatgtttaaggaacaatccttaagaatttaagggcccggcacggtggctcatgcctgtaatcccagcactttgggaggccaaggagggcggatcacgaggtcaggagctcgagaccatcctggctaacattgtgaaaccccgtctctactaaaaatacaaaaaattagctgggcgtggaggcgggcgcctgtagtcccagctactctggaggctgaggcaggagaatggcgtggacctgggaggcggagcttgcagtgagccgagatcgcgccactgcactccagcgtgggtgacagggtgagactccatctcaaaacaaaaaaaaaatttaattaaattgtctcatttaaaattactagtagtgttccagagccttgtgactggggagcagaggcctgagataagtgattccaagctaagtccacctttgagcctgcaaagaaagatcattgaaggcccaattggttcttcctggggagcctcccctacaggtctgccagctactcatatgcccaccatggaaggatcctcttgtactgaaagaaactgcagagcacttggaagctgaggatgcacaggcagatgctgttaggggaagaggggaggatgtctgaggttttaattgtggtttccttgggtgtgtttttagacattacgttttgagtttcacttccgtaatataggtgtactgggtgtaattggtgcatattgacagtgtctgtgaaggtcaggacttatgtttcctagagacagggttaatgaattggggagctcatttgcatcagaacctcaatctcaatctggttgagagtttcctcacttgggaaaacggaaacctagggaagctaatgtttctttgctgccataggagagaaggaggtgtggagctcccatagttccttgctgatcaggtgcttctatcctccattaccaggtactgacccactctaggggttacatttttctttatttttattttttttgagaccgagtctcactctgttgcccaggctggagtgcagtggcacgatctcggctcactgcaacctccgcctcctgggttcaagccattctcctgcctcagcctccagagtagctaggattacaggtgtgtgccaccaggcccggccaatttattttgtatttttagtagagacggggtttcaccgtgttgaccaggctggtctcaaattcctgacctcaggtgatctgcctgccttggcctcacaaagtgctgagattacaggtgtgagccaccacgccaggccggggttacgtttttcaagctgggagagtctgggtccaagctggggaatatgtttaactttttttttttttttttggaaacggagttttgctcttgttgcccaggctggagtgcaatggcacaatctcggctcaccgcaacctccgcttcccaggttcaagcgattcttctgcctcagcctcccaggtagctgggattacaggcgtgcgccaccatgcccagctaattttgtatttttagtagagatggggtttctccatgtttgtcagtctggtcttgagctccccacctaggtgatctgcccaccttggcctcccagagggctgggattacaggtgtgagccactgcgtccggcctttttttttttttttttttttttttttttttttttgatacagcgtctcactctgttgcccaagctggtctggaactcctggcctcaggccgtcctcccaccttagtctcctatgttcaactttttttttttttttttttttttttgagacagggtcccactccgtcgcccaggctggagtgcagtgatgtgatcattgctcactgcagcctccacctcctgggctcaagtgatcctcctgcctcctctgagtagctgggactgcatgcatgcaccacaatgcccatctaattttcgtattttctgtagagatggggtttcgccatattgcccaggctggtctggaactcctgggctcgagcacttctcccgccctggcctcccacagcgcatggcctcccacaatttcttgacatccaaagatacttttgctgtcttaaggttttatattttccagaatgtaatacacgtggagttattcaggatatagccttcacagattggcttccttcactgagcaatgtacttttaaggtccttctgtgtcttcatggcttgatacctgatttctcttatcgttgaacaatatttcatcataagattgtaccggccgggcacgatggctcatgcctgtaatcccagctctttgggaggccgaggcgggcggatcacaaggtcaggagtttgagaccagcctggccaacatgacaaaaccccgtctctactaaaaatacaaaaattagctgggtgtggtggcgcacacctgtaatctcagctacctgggaggctgaggcaggagaattgcttgaacctggaaggtggaggttgcagtgagccgagatagtgccattgcactccagcctgggcaacaagagcaagactccgtctcaaaaaaaaaaaaaaaaaaaagattgtaccacagattgtttatccataaacctgttgcatgatgtcttggttaagtcttaaatttggcagttatgaagaaacctcctgtaaatattcatgggcaggtttttgtatgaacagtatttttcaactcatgtgagtaaatagcaaggaatgtgattgcatggtccactggtaagaggacgttttgttttgttagaaactgcctatcttccaaagtagacataccattttccatttccattggcaaggaatgagaattcttgttgtctacatctttgctatccattgctgttctcagcattttgaactttgtacgttctaataagtgtaaagtgatatctcttcagttttatttgcagctccttagtgacatataattgagcatctcttcatatgtgtatttgccatctgtatatctttcattggtgaggggtgtgttcaggtcttttgctcatttttcactggttcatttgtcttatttttgttgagatttaagagttcgaattggaggcaggcatggtggtacacgcttgtcatcccagctactccagaggctaaagtgggaggattgcctgcacccaggattataagcccagcatgggcaacataatggatcctatctcaaaaaaacaaaaaggacgctaggcatggtagctcatgtggggccacccaggctgctggggagcagagctgagaagtggtgctggggctggagctgccaagggatcggagaaaaaaaattagcccaatgtgggtggcacacccctgtagtcccagctatttgggaggctgaggcatgagaatcgcttgagcctaggaggcagaggttgcagtgagccgagattgcaccactgcactccaccctgggcaacagagcaagactgtctcaaaaaaaaagaaaaacaaaaagaattctttggatattttagatactagtccttaatcagataagtgcttttgtgaagatttgcaaaaatctgtctgtgccttttatttttattcttttaacactttctttcacagagtaggagtttttcattttaatgaagtgaaacttattttttcctttcatagattgtgcttttagtggtttatctaaaaattcatcaccaaagccaagtggatagttttgcatgttacatttacatctatgatcgatttgggcttaatttttgtgaaaggtgtaagatccatgtataaattttttgtgggtgtatgagagtttaatagtataaatttcacttaggtactatttttgttgcattccacaaattttgataagttctattttcatttaattcacatttaatttttcttttttcttcttttttttttttttttgagacggagtcttgctgtgtcactcaggctggagtgcagtggtgcagtcttggctcactgcatcctccgcctcccgggttcaagcgattctcctgcctcaacctctcaagtagctgggattacaggcacgtgccaccatgcctgtctaatttttttatttttagtagagatggggtttcaccatgttggccaggctggtctcgaactcctgacctcgtgatccgcccaccttggccccccagagtgctgggattacaggcatgagtcactgcgcccggcccaaatttaatttttcttgagatttttttgattcatgtttagaactgtgttgggttttatttccaaatatttgatggttttctaactattcttctgttactgatttctagattaataccatggtggtctgagagcatattttatataatgtatattctttgaaaattgttaaggtgtgtttttgtccacaacatggtttatcttggtgaatgttccacatgaacttgagaagaatgtgtgttgttctgttggatgaagcattcatggattttaattaaacccagttgttgcctttcaactaaactttgtcctttctgattttctacctgctggaactcttttttttttttttttttttttttggagacagggtattaccctgtcaccaggctggaatgcagtggcatgatctcagcctactacaaccaccacctcagccttctgagtagctggaactacaggtgcgtgccacatacagggctaaattttgctttttttttttttttttttttgagacagagtttcgtccttgtcgcccaggctggagtgcagaggcaagaactcagctcactgcaacctccatccactgggttcaagcgattctcctgcctcagcttcacaggtagctgggattacaggtgcacaccatcatgcccggctaatttttgtatttttagtagagatggagtttcaccatgttggctaggctggtctccaactcctgacatcaggtgatccacccaccttggctttgcaaggtgctgggattacaggcgtgagccaccacgtccaccaaccatctattctttttcacaagtattgtatttttaaatttttgcctcctttgaacatttaatgagtattaatggaattacacttaaagggttttttggagcctaggcaacatagtgagacccatctttacaaaaaatgaaaaaattagccaggcatggtgatgcacacctgtagtcccagctactcaggagtctgaggcgggaagattgcttgagcccgggaagtcgaggctgctgtgagccgtgactgcaccactgtactctagcctgggcaacaatgagaccccgtctcaaaaataaaataaaggccgagtgtggtggctcgcgcctgaggctaggagttcaagaccagcctggccaacatggtgaaaccctgtctctactaaaatacaaaaaattagctgggtatggtggtgcgtgcctgtaatcccagctactcaggaggctgagacaggagaattgcttgaacccgggaggcggaggctgcagtgagccgagatcatgccactgcactccaccctggggaacaagagcaaaactccacctcaaaataaataaataaataattttgtggtgatttgtttacctctcagtgtgtgtgtgtgtgtgtgtgtgtgtgtgtgtgtgtgtgtgtatttatttatttttttgagatggagtctcactctgttgccaggctggagtgcagtggtgtgatctcagctcactgcaacctccgcctcctgggttcaagcgattctcctgcttcagcctcccgagtagctgggactacaggcatgagccaccatgcccagctaatttttgtatttttagtagcgacggagtttcaccatgttggtcaggatggtctcagtctcgacctcgtgatccacccacctaggcctcccaaagtgctagggattacaggcgtgagccaccacgcctggccacctctcagtatatttctcatatgctagtatctgaagctgcaggctatccgttccaatggttgtggtgtttagactttttcacggttttgtttttgtttgctttgtggaaaataatgctcctactatttttgtttcagtctgcaagtgcaaacgcacaataaattctctggtagttggaaaaaaattactggatcttggtcaagtttaaatttacaaacttaaaaaaagtggtggagtgtatcagttgatcctccgtttgtacatgattgttctctgtagtcatcaacactaatgttatctttttttttttttttttttttttgagacggagtctcgatttgtctcccaggctggagtgcagtggcgcgatctgggctcactgcaagctccgcctcccgtgttcacgccattctcctgcctcagcctctcgactagctgggactacaggcgcccgccacttctcctggctaattttttgtatttttagtagagacggggtttcactgtgttagccaggatgctctcgatctcctgacctcatgatctacctgcctcggcctccccaagtgctgggattacaggcgtgagccaccgcgcccggccactaatgttatcttaatcgactagttttgtcttcctactcagtttgaagtgggaactatttgacatttatatcctcattagcaaggagatgaaccttttttttctgtttttttttctttttattatttagtaaaaggctatatatgaaatctttatttatttatttatttttattttatttatttatttttttgagacggagtctcgctctgtcgcccaggttggagtgcagtggcgcgatctcggctcactgcaagctccgcctcccgggttcccgccattctcctgcctcagcctcccgagtagctgggactacaggcgcccgccacggcacccagctaattttttgtatttttagtagagccaggatggtctcgatcttctgacctcgtgatccacctgccttggcctcccaaagtgctgggattacaggtgtgagccaccgcacctggcctgtctttatttatttttggctggagtgcagtggtatagttatggctcactgcagccttgactttgcaggctcaagcaatcctcccacctcagcctcccaagtagctgagaccacaggcgtgcaccaccacgcctggccaagttttgtatattttatagagacagggtttcaccatgttgcccaggctggtctcgaactcctgggctcaaacgatctgcccacctcagcctcccaaagtgctgggattataggcatgagccatcacgcctggccaaaatgtttattttctattaaatgtaaatgtaaataaaccttacagagagcacccaggcatgcagatggacttgtcacgagggagagctccctggagccaaatttcttcctgctcagaccatagtcctaattacttaagaaaaccccttctaactgtgtggatcttttaacgtatggtgcacatgagtgcatggaaatgagagaacctgggacaacagcccctagagtgtctgtctgggatcacttcctcctgaaactggagaaaggggatttatgttcttttttttttttttttttttttttgagatagagtctcgctctgttgcccaggctggactgcagtggtgcgatcttggctcactgcaacctctgcctcccgggttcaagcgattctcctgcctctgcctcccgagtagctgagattacatgcatgcaccaccatgcccaactaatttttgtatttttagtagaggcagggtttctccatgttggccagggtggtctcgaactcctgacctgaggtgatccacctgcctcggcctcccacagtgctgggattacaggcatgagccatcctgacccagattttatgttcttttggaggtatgaaattacctgttaattttataatcatgggcaaattcaccatcagaccattgtggacatcagtgaagtcccctgaaaattgatactgtcaatctattcttcaaggtcagcaaagcccagatgacatgattatggatcttccagaaagtgctcttctgacattttatctcaatgtgtatatgtatttgtgctaaaaattggttggaagcagttctgaggctcatgggtataacgattttgtgaaagtctaagttgtgagggccccttccttgtgcctgagctgtcttcccagtaacttcctagtctcacgaaatgggacagaaagtaaaaggaaaaactgggtctatgatagatattacacacacagccgggcgtggtcgctcatgcctgtaatgccaacacatagggatatatatatatcggaaacaagttgaaattaatacgtctctaaaagagtatttccattcagtcagcagaatctgagtgcttctgatggcctcaaatacttcaggacgatataggcagctagaccttcttaaaagttggatttccacaagcctcctggcctctcatgtataacaaaaggggatagaagattctcaatgtgtatttacttattaaaacctccacctcggtggggggtcagcccccctgcccggccagccgccccgtccgggagggaggtggggggggtcagcccccccgcccggccagccgccccgtccgggaggtgaggggcgcctctgcccggccaccaccccgtctgggaggtgtgcctaacagctcattgagaacgggccaggatgacaatggcggctttgtggaatagaaaggcgggaaaagtggggaaaagattgagaaatcggatggttgccgtgtctgtgtagaaagtagacatgggagacttttcattttgttctgcactaagaaaaattcctctgccttgggatcctgttgatctgtgaccttacccccaaccctgtgctctctgaaacatgtgctgtgtccactcagagttaaatggattaagggcggtgcaagatgtgctttgttaaacagatgcttgaaggcagcatgctcgttaagagtcatcaccactccctaatctcaagtaatcagggacacaaacactgcggaaggccgcagggtcctctgcctaggaaaaccagagacctttgttcacttgtttatctgctgaccttccctccactattgtcccatgaccctgtcaaatccccctctgtgagaaacacccaagaattatcaataaaaaaataaattaaaaaaaataataaataaaaaaaataataaaaaaaagactgtctcaaacaaaaaaaaaaaaaaaaaaaaacctccacctcatttaatcccatatcttaaggaatgctgaatgatttgggtaataagaaattaggctgtgggctgggtatggttattcatacctgttatcacaacactttgggaggccggggcaggaggatcacttggggccgagagttaaaggtcaacctggacaatataacaaaaccccagccggaggcagtggctcacgcctgtaatcccagcactttgggtggccgaggagggtggatcacgaggtcgggagttcaagaccagcctagccaagatggtgaaaccccatctctactaaaaatacaaaaaattagctgggcgtggtggcacgcgcctataatcccagctacttcggaggctgaggcagagaattgcttaaacctggaggggcggaggttgcagtgagccgagatcgcaccactgcactcctgcctgggttacagagtgagactccgtctcaaaaaaaaaaaaaaaaagaaagaaaaaaaacccatttatctgggagtggtgttgcacatctgtagtcctaactactcgtgaagctgaggcaggaggatgtcttgggggcccagggatttgaggctacagtgagttaggattgctgcacttgagcctaggtgacagagcaagaccctgtctcttagaaaacaacaaacaaacaaacaagaaataagaatttatctcataaagaattgaagatcttgcctgtaatctcagcaatttgagaggccaaggctagtgaatcgcttgagctgaggagtttgagaccagcctgggcaacatggcaaaaccccatctctacaaaaaatatacacaaaatacttacctaggtgtagtggtgtgttcctgtagtcccagctactcaggaggctgaggttggaggattgcttgagccgggaggactaggctccaatgaactgtgattgtaccactgcactccagcctaggtagcagagcgagaccatctatgtctcaaaaaggaagaaaaaaaaattgatcctaaaatttgtctcatttgtgtaggatttctttcatttttctaagttgaactagatactaccattagagagcaataggacttacagtgaccacagtgaagatgtagctataagtttatgtgttcaatgtgctgttacatttctaacaattgagtcatgcactaaatgtttggagaccacaaaatcgtgtgtgaatttcttatgaattgaggatacctctcatccttgtcaatctcacctattctctacttatattggatgtttcaggactcagtggcttttgaggatgtgtctgtgagcttcagccaggaggagtgggctctgctggctccttcacagaagaaactctacagagatgtgatgcaggaaacattcaagaacctggcatctataggtaaggatgacatcattttttcttttttctttttttttttttttggggggggacagagtttcactattgtccaggctggagagcaatggcacaatctcagctcaccacaacctcagcctcccaggttcaagcaattctcctacctcagcctcccgagtagctgggattacaggcacgtgccaccatgcctggctaatttttttctttttagtagagacgggatttcaccatgttggtcaggctggtcttgaactcctgaccacaggtaatctgcccgcttcagcctcccaaagtgctgggattacaggcatgagccactgtgcctggccttcttttttttttttttttttgagtctcgtcctgttccccagggtggagtgcagtggcgggatcttggctcactgtaacctccgcctcctgggttcaagcaattctcctgcctcagcctcccgagtagctgggattacaggtgcccaccaccatgcccggctaatttttgtatttttagtagagacggggttttatcatgttggccaggctggtctcgaactcctgacctcaggtgatccacccgcctcagcctcccaaagtgtggggattacaggcatgagccaccgcaccccagtgacatcattttttcatatcgtcagttagagaactgccatttcttgctcataatcactgttccgagatttggaatctgaaaaggaaacacttctgtaaataaaccaggcatggttacagctcattgtgaacctataatctaataatatttgtataatttttaataatttatcatgattattcttgatctacattttaggggaaaaatgggaagacccgaatgttgaagatcaacacaaaaaccaaggacgaaatctaaggtgagttgcactcacaagaagtaacagtgttccttgaaagaatcttaaaaatgttatggccgggcacggtggctcacacctgtaatctcagcactttgagaggctgaggtgggtggatcatgaggtcaggagttcaagaccagcctggccaacatgatgaaaccccgtctctactaaaaatacaaaaaaagttagccagttgtggtggtgggcgcctgtaatcccagctactctggaggctgaggcagagaattacttgaatccaggaggcagaggttgcagcgagccgagatcgcgccactgcactccagcctgggcaacagagcgagactctgtctcaaaaaaaaaaagaagttgtgacacttttaaaacaagaagcaagcttagctccaaatttatttatttatttgttttatttattttttcttgagatgaggttttgctctgtcactcaggctggagtgcagtggcatggtctttgctcactgcaacctccacctcccgggatcaagtgattttcctgcctcagcctcccaagtagctgggattacagggacgtgccaccacacctggctaatttttgtatttttagtagagacagggtttctccatgttggcaaggctggtctcaaactcctgacctcaggtgatctgcccgcctcagccttccaaagtgctgggattacaggcacgagccactgggccccaaatttatttattatcagaaaatgtttaccaaaaatgttttctcaagtgacacagatgtccactggctgaaaaatattatacttgggccgggcactgtgcctcacgcttataatcccagcactttgggaaggtgaggtgggcggatcaccagaggtcaggagatcaagaccagtctggccaacacagtgaaaacctgtctctactaaaaatacaaaaattagccgggtgtggtggcacacacctgtcatcccagctactcaggaggctgaggcaggagaatcacttgaacctgggaggcagaggttgcagtgagcccagatcgcaccactacactccagcctgggcgacagagtgagactccatctcaaaaaaaaaaaaaaagaagaagaagaagaaagaaaaatattgtacttgggaacagttttgtttgtttgtttgttttgtgaaacagagtctcgctctgtcacccaggctggagtggagtggtatgatcttggctcactgcaacctctaacccctgggttcaagcaattcttctgcctcagcctcccaagtagctgggattataagcgcgcactactatactgggttaatttttgttttgttttgttttttttgagacggagtctcgctctgtcaccaggctagagtgctgtggcgcaatctcggctcactgcaacctcccactccctggttcaagggattcttctgcctccgcctcccaggtagctgggattacaggcatgcatcaccatgcccggctaatttttgtgtttttagtagagatagggtttcactatgttggccaggatggtcacgatctcctgacctcgtgatctgcccacctcggcctcccaaagtgctgggattacaggcgtgagccaccatgcccagccaatttttgtattttttagtagagatggggtttcactatgttggcctggatggtctcgatctcctgacctcgtgatctgcccgcctcggcctcccaaagtgctgggattacaggggtgagccaccatgcccagccaattttgtattttttagtagagatggggtttcaccatgttggccaggctggtctcaaactcctgaccccaattgatccacccacctcggcctcccaaagtgctaggactacaggcatgagccaccatgccaaggtgtggaaacagtattttattttatttttatttttatttttgagacgaagtcttgctctgtcacccaggctggagtgcagtggtgccatctcagctcactgcaagctccgcctcccaggttcacgccattctcctgcctcagcctcccgagtagctgggactacaggcgcccaccaccacgcccggctaatttttttgtatttttagtagagacggggtttcaccctgttagccagggtggtcttgatctcctgacctcatgatctgcccgtctcggcctcccaaagtgctgggattacaggcgtgagccactgtgcccgcccagaaacagtactttaaagcctcacatataatttccggaagccaaggtgagcagatcatttgagctcaggagttcgaaaccagcctgggcaacaagacgagaccctgtctctacaagaaacagaaaattcagtcagttgtggtggtgcatgcctgtagtcccagctacatgggaggctgaggtgggaggattgattgagcccgggaggtcaaggctgcagtgagccatgattgcatcactgtactccagtgcgggtgacagagtgagactctgtctcaaaatgaaaccaaaaaaaaaaaaacccatacctcaatattactgttttgataatagctatcagtgacacaagccctcttgcagaacattgagtatattcgtttttaaacaagtcagacggggcagaaaactatttccctgaaaatgataaaaatttagttctgctgccgggtgcggtggctcacgcctgtaatcccagcactttgggaggccaaggcgggcagatcacttgaggtcaggagttcaagaccagcctgaccagcatggtgaaaccacggctttactaaaaatacaaaattagctgggcgtggtggcgcatgcctgtaatcccagctacttgggaggccgaggtaggagaattgcttgaagctgggaggtggaggttgcagtgagctgagatcgcaccattgcactccagcctggggaacaagaacaagactccgtctcaaaaaagaaaaaagaactttagttctactacccgataatacatataaaatcattaatacacaaccagtattaccgtgcttctaattttttacagaagccatacgggagagagactctgtgaaggtaaagaaggtagtcaatgtgcagaaaacttcagtcccaatctcagtgtgacgaagaagactgccggagtaaaaccatatgagtgtactatctgtggaaaagccttcatgcgtctctcatcccttactagacacatgaggtctcacactggatacgagctatttgagaagccatataaatgtaaggagtgtgagaaagcctttagttatctcaaatcctttcaaagacatgaaaggagtcacactggagaaaaaccctataaatgtaaacaatgtggaaaaaccttcatatatcaccagccctttcaaagacatgagcggactcacattggagaaaaaccctatgaatgtaagcaatgtggaaaagctcttagttgttccagttcgcttcgagttcatgaaaggattcacactggagaaaagccctatgaatgtaaacaatgtgggaaagccttcagttgttccagttctattcgagtacacgaaagaactcacactggagagaaaccctatgcatgtaaggaatgtgggaaagccttcatttcccacacaagtgttctaacacacatgataacacacaacggagatagaccttataaatgcaaagaatgtggaaaggcattcatttttcccagttttttacgagtacatgaaagaattcacactggagagaaaccctataaatgtaaacaatgtggtaaagccttcagatgttccacctccattcaaattcatgaaagaattcatactggagagaagccctataaatgtaaagaatgtgggaaatctttcagtgcacgcccagcctttcgagtacacgtgagagtgcatactggagagaaaccctataagtgtaaagaatgtgggaaagcctttagtagaatcagttactttcgaatacatgaaaggactcacactggagagaaaccctacgaatgtaaaaaatgtgggaaaactttcaattatcctctagatttgaaaatccacaagagaaatcacactggagaaaaaccctatgagtgtaaggaatgtgcaaaaaccttcatttctcttgagaactttcgaagacacatgatcacccacactggagacggaccttataaatgtagggactgtgggaaggtgttcatttttcctagtgcgttacgaacacatgaaagaactcacactggagagaaaccctatgaatgtaaacaatgtggaaaagcctttagttgttctagttacattcggatacataaaagaactcacactggggagaaaccttatgaatgtaaggaatgcgggaaggcctttatttatcccacaagctttcaaggacacatgagaatgcatactggagagaaaccctataaatgtaaagaatgtgggaaggcctttagtcttcacagttcctttcaaagacatacaagaattcacaattatgagaaacctcttgaatgtaagcaatgtggaaaagccttcagtgtgtccacatccttaaaaaaacatatgagaatgcacaatcgatagaaactctataaatgtgagaaataggagaaagttttcaattctaacagatgctttcaaagttgtgaaaattcccactgaagagagaaatcctgtcaatgtaagtaatatagaaagcgagatacaagatgattcatgtatagtcaggtaccacataatcatgtttcagtcagcaatggaccatataggttggtagccccataagattatataacacctaaaacatttctatcaaccgcaatttagtagcagtagtaacaccatagtgcagcacattatttaagtgtttatggtgctggtgtaaacgtgctgcactttcagttgtataaaagtacaagacagcggccggggacggtggctcacgcctgtaatcccagcactttgggaggccaaggcgggcggatcacgaggccaggagatcaagaccatcctggctaacacggtaaaaccccatctctactaaaaatacaaacaattagccgggcgtggtggtgggcgcctgtagtcccagctacttgggaggctgaggcaggagaatggcataaacccaggaggccgagctgacagtgagctgagatccggccaacagagcgagactctgtctcaaaaaaaaaaaaaaaaaaaaagtacaacacagctgggcatggtcacacctgtgatcccaacactgggagactaaggcagtaggattgcttgatgccaggactactctggtcaacctagtgagaccctgtctctacaaaaaataaaaacattttctaagtgtggtagcacaccctgtagtcccatctacatgggaggctgaggcaggaggattgcctgagcccaggagttcaaggctacagtgaaccaagatcacgtgatggcagtccagcatgggtgacagtgagactgtatcaaaaaaaaaaaaaaaaaattggctgggcacagtggctcatacctgtaatcccagcactttgggaggctgaggtgggagaatcagttgaggtcaggagttcaagaccagcctggtcaacatgatgaaaccctgtctccattagaaatacgaaaattagctgggcgttctggtgtgcctgtagtcccagctacttgggaggccaaagcaggagaatcgcttgaacccgggaggtggagattgcagtgagctgagatctaccactacactccagcctgggtgacagagcgagactccgtctcgaaaaaaaaaaaattacagcacagatgtgcaatatatacttgataataaatggctaagttactggtttatatatttacaatcctgttttagaatgtattcctgtgtttttttaacagtaagacagtctcaggcaggtccttaaggagatattcccggaaaaactttgttatgataggcgatgacggctccatgtgcaggactgcccctgaacgtattctggcgggacaaaacatggaggcagaagacaatgatattgatgatcctcaccccgtgtagtcctacactaatgtgtgtttgtgtcttagttagtctttaacaaaaatagtttaaaaaaatttaatagaaaaagcttatagaatatggacataaaatatttttgtacagctgtacaatgtgttttaagctaaattattacaaagtttttaaaaataagtttataaagaaaataatgtacagtaagttaaggtttattcattattgaggaaaaaatgtttttatgaatgtagtgtagtccaagtgtacagtgtttataaattctccattagtgtacagtaacatcctgggccttcgcattcactcaccactcaactgactcacccagagcaacttctagtcctgcaagctatgttcatggagtgtcctatgcaggtgcatccttttttatcttttatactgcatgtttactctgtgtattttctgtgtttagactcataaatacttaacattttgttacaatttcctacagtgttcagtacaacaacatgttgtatggtttatagcctagtagcaatagactgtaccatatagtctagatgtgttgtagctataccatctagatttgtgtaagttcactttgtgatgtttgtaccatgaggaaatcacctacaacacgtttctcagaacatatacccatgattaagcaatctctgcctgtaaaatgctccagaaaattcacaccatgatataaattcatcacacacgatataaaagttaaggcaaggcatggtggctcatgcctgtaatcccagcactttgggaggccaaggcaggcagatcacctgaggtcaggagttcgagaccagcctggccaagacggtgaaaccccatctctactaaaaatacaaaaattacctgagcgtggtggcatgcacctgtaattccagctacttgggaggctgaagcaggagaatcatttgaacctgggaggtggaggctgcagtgagctgagattgtgccactacactccagcctgggcaacagagcaagactccatcccacacaccaaaaaaaagttaaaaattttttatcactggctcattcttcaagtacatctctggactatgaattgtaacttaactacttttccaagaagtcttggaagtgagataattctgtaagtactctttaagcagtggtcaaaagtttaaaaggttgtgttttctcattaaatcagttagtaaaacttttctctttctcttgatgtcttgattcatgagtaaactgaagtgtattttttttttttcgagacggagtcttgctctgttgcccaggctggagttcagcggtgtgatctcggctcactgcaagctccgcctcccgggtccacgccattctcctgcctcagcctccccagtagctgggactgcaggcgcccgccaccatgcccagctaattttttttgtatttttagtagagatggggtttcaccgtgttaagccaggatggtctcaatctcctgacctcgtgattcgaccgcctcagcctcccaaagtgctgggattacaagcttgagccaccgcacccggcctgaagtgtattttttttttcttttaaagaccagtgttagtagaagtgtatttttaatatacaattagttttaatttgtgtatagtttttcagttgttctctgaataaagagattgttgaatactgacacactgtaactaggatttttcctactggcctcatgtggaaggtggtgcatatattacccattatatatttatttcaccttttccgaaaaactgctttttaaatttcttggccagacacggtggctcactcctttgtaattccagcactttgggaaaccaaggcaagcagatcacttgaggtcaggagttcgagaccaacctggccaacatggtgaaatcccatctctactaaaaatacaaaaattagctgggcatgttggagggcacctgtaatctcagctacttgggaggctgaggcaggagaaatgcttgaacctggaagtcagaggttgcagtgagccaagatcacaccactgcactccagcctggacaacagaacgagactccatatcaaaaaaattaaattaaaatataataaatttcttgccgggcgcagtggctcacacctgtaatcccagcactttgggaggccgaggtgggcggatcacgaagtcaggagattgagaccatcctggctaatacagtgaaaccccgtctctactataaatacaaaaaattagctgggcatggtggcgggcgtctgtagtcccagctactcaggagtctgaggcaggagaatggtgtgaacccgggaggcggagcttgcagtgagccgagatcgtgccactgcaatccagcctgggcagcagaacgagactccatctcaaataaataaataaataaaatgaatttcagctagaagagccttattccattttcctttttattaaacatctggcataagttggtaagtatgtgaagtttatcatatattcttatgcgaattattattttcgccttttttttataattctgtctgggatttgaatagtagagtttgaattcaggaaggacacctgtgataggacaataaaatctagagctggacgtggccctcctgctacctgtcgacacaggtaaatttcctagaatctgttccctttatagatccatgttgaaattcacttatagcctcacttgcatgagatttgccaggcagaagtgaagaagacattagtcaggtattggaaccccaccatacagggagacagcctgcttcctgctcattttcctggttattttctctgccaatcaaaagtatcctgaaaacaccctgagctgcttgacttccattctcaaagagatgtgttggtttccacagttgtctccacaagctccgcatcaaagatccacgtacagtttggattttccttctagccttcatgtgtggcccaagcatctatttcagactgtcatggttggcattgttctctgaggttctgtcttccctttgtgtttctatgagctttaatttgtatggttcttgttctgttaatgccactagggactatgtattcctgattccaccatgacagctacagtaaaacagtaaaaaaaaaaaaaaacaactatatgggagtttgttctcttactgcattatacagtgactactctcccccatccttccatttgagaataatcaccttcctcatatcagacaaattgtgggtgtttccaactattcctgaatattctccatcggtttattttcatttatgtttggttgtatgcaactaaaataatgcattttttatttatttgaagcaaaagcttcttagatgtttcttagaaatattttgttaactgtttccaaacaacatgtatactatcaaatattatcatcatctgggtgcagtggctcatggctgtaatcccaacaatttgggaggctgaggcaggattgcttgaggcctgaagttggagaccagcctgggcaacatagtaagaccccatctctattagttcaaaaacaaataattgtcttccccgtttcctgaaaggctatattaaaatatcccattacagttatgaatattcagatcaactttgtcattttgtcaagatacattctgactcaatattagcatgtgcataaatgttctggtatttttcccttagatgttttttattcttatacttacattttgtcataaaacaaaattctcttcaaaacagtggtattttcagtgccctattgccagcaatcaccacggtcacacctgtattcagaattaattatggtaatacagtagtcaattctgatccaaagttttgctttctgtggttttagtcactcatggtcaaacacagtccaaaaatacttagtggaaaattccagaaataaatgtttcatagacttatttatttatttatttatttgagacagagtctcactctgtcgcctaggctggagtgcaatggcgcgatctcagctcactgaaacctctgcctccgaggctcaagcaattctcctgcctcagcctcccgagtagctgggattacaggcatgtgccaacatgcccagctaatttttgtatttttggtagagatagggtttcaccatgttggtcaggctggtctggaactcctagcctcaggtgatccacccacctcagcctcccaaagtgctgggattcctcccatcttacacatgaaaaaacagaggcagagagagcacagggtctttcccaaactcatgtaaatcagaattatagagtctcaaagttttgaagttctagtgtgttccaccacctgtcaaactttttttttttttttgagatgaggtcttgctctatcacccaggctagattgcagcggtgcgatcatagttcactgtcaccttgacttctggggagtgatcctcctgcctcagcctcccaagtagttgggactgcaggtgcatgcttccataagcggacttagaaaatttgaatgaggccgtactgggtgcctcatgcctgtcatctcaacactttaggaggctgaggtgggaggatggtttgtgcccaggagttccacgtggcagtgagctgtgattacaccactgcacagcaacctgggcgacagtgaggctcagtcgtgttgaaaaaagaaaagacagagagagaaagaaaagaaaaagagagaaagaaagaaaaagaaaggaaagagaaagaaagcaaaagaaagaaaagcagagatatgagagaaggaaggaaggaagggaaggagaaaaaaggaaaaaaaaaaagaactgagaccccatctctacaaaagtaaaaaattagctgggtgtggtggggcacacctgtgattccagctactccagaggctgaggtgggaggatggcttgagcccaagagttcgagcctgcagtgagccatgatcatgccactgcactcagacctgggtgacacagttcatgtcagccaccttccaaaacaggcaagaatgctatgtgtgtcatagcctataatttgtaccacattaaggttgctttgatctagggcagaacttatgagtcctttttttttttttttttttttttgagaaggagtcttgctctgccacccaggctggagtgcagtggcgcgatattggctcactgcaagctccgcctcctgggttcacgccattctcccacctcagcctcctgagtagctgggactataggcacccgccaccatgcctggctaattttgtttttatatttttagtagagatggggtttcaccgtgttagtcaggatggtcccgatctcctgacctcgtgatccgcccgcctcggcctcccaaagtgctgagattacaggcgtgagccactgcacccggccaaagcaccattctctaaaatccccaccaagcctttgtctccttgcagttagctcctctctgggtgtgctgcctggtggaaccctgtaatgtattttctttctttctttcctttttttttttttttttttttttttgagacggagtctcactctgtcgcccaggctgaagtgcagtggtgcgataccggctcactgcaacctccgccccccgggttcaagcgattctcctgcctcagcctcccgagtggctgggattacaggcgcccgccaccgcgcccggctaatttttatatttttagtagagacgggatttcaccatgttggccaggctggtctcaaattcctgacctcaggtgatccacctgcctcagcctcccaaagtgctgggattacagacgtgagccaccgcgcccggccaaccttgtctcttaaaagtaaaaacaaaatgagagataagaagaaatatttttggaaggcgcacaggggaataaagccaccagggcattttaatcataaactccttgtcccatcaaggccatccctaccctttgccctcccctccccaagacctaccctgccccgccccatcctggccccctccagccttcatccccctttttcccctctttccccactttgtctcctcttccccactttatcacctcttgcccctgtgcggccccgccgaactggaaacgtttccagcaggtgattcagatgcgcctgtgcaggactgtgaccaggtgcaagtcgccctcccctgacctccctgtttagcctgaatgatccttcccaagtgtgttgctccattctcgcgctgctataaagaactacctgagctgggcgcgatggctcacgcctgtaatcacagcactttgggaggctgaggcgggtggatcacctgaggtcaggagtttgagaccagcctgactaacatggtgaaaccccatctctactactaataataaaaaaattagccgggcgtcatggctcacgtctgtaattccagctactcaggaggctcaagcaggagaatcccttgaacccgggaggcagaggttgcagtgagcggggatcacgtcattgcactccagcctgggcaacaagagtgaaactccgtctcaaaaaaaagaaaaaagaaaaaaactacctgaggctgggtaattcacgaataaaagaggtttaattgactcacagttctgcaggctgtacaggaagcaaggctgggaggcctcaggaaacttatcaaggcggaaggctactggggatcgagtcagtcttcacttgaagcaggagggatcaggagagagcacgaagtgggaagtgccgcacatctttaaaccatcagatctcctgagaactatcacgagaacagcaaggggaaagccgcccccatgatctaatcacctcccagcaggtccctctcctggtattagaaattaaaattgaacatgagatttggttggggacacacagccaaaccatatcaccaaggttttctgtaagtgtctgatgaatacgcacagtgggaactgcagctgagctttaggtggcatcctaaaagcctctttgtcagcctgagcccgtgtcctcttaagagggagagttggggctgggtgcggtggctcacgcctgtaatcccagcactttgagagaccgaggcgggtggatcatgaggtcaggagttccagagcagctggccaacatgatgaaaccccgtccgtactaaaaatacaaaaattagccgggcgtggtggcgggcgcctgtaatcccagctacttgggaggctgaggcaggagaatcgcttgaacccaggaggcagaggttgcagtgagccgagattacaccaccgcactccagcctgggcaacagagcgagactctctcaaaaaaaaaaaacaaaaaaaaaaaacggggtgggcgacttggaaaagatttcaggactcactctcagcgacggtgccccacgtgagttggaggccaggagcaaggtgccttcctgggcctccctggctgcgatcctgtcctcaggagggcgaccccagtcacgtgcgaccgctcaaggcggtcctcagaagcggaggggacctccgcgggccagtaggccttcagaattcttagaaatcactcacccccgtcctgcagtgacaatctcaggagagcctgtctacagactggcgcctgtagagaagatcctgccattgcccctggcttccaggaactgaactggattctgagcatcatggcagaatcttatcccacctatgcagcaggctagctccagggagaaaatataaacgtcaggccgggcgtggtggctcacgcctgtaatcctagcactttgagaggccgaggcaggcgtatcacgaggtcaggagatcgagaccttcctggctaacacagtgaaaccccatctctattaaaaatacaaaaaattattcaggcgtggtggcgggcgcctgtagtcccagctactcgggaggctgaggcagaagaatgacgtgaacccgggaggcggagcttgcagggagccaagatggcgccactgcactccagcctgggcgacagagccagactccgtctcaaaaaaaaaaaaaaaaaagaaaagaaaatataaacgccaacaaacaggtaattcccaatcaccggcaagaccccgccggattggaccccgaccctcagcagaggccaccttgtccgggtctcactctaacctgtaccgcggccccaagatatcagaggctgccttggtggacccggggcactttccacagaactccctgaatggccaaggctggccctggcctcaataggccaactcagcaaacgtggagaaggcagggaacggtgggtaagggaagtcatcccaacattttgggagtccgaggcgttatatggcttgaacccaggagttcaagatcagcctgggcaatatagcaagaccccatccttttttgagactgagtcttgctctgtcgtccaggcgggagtgcagtggtgcaatctcagcttactgcaacctctacctcccaggtttgagcgattctcctgcctcaacctcctaagtagctggaattacagttgcccgccaccacgctcggctaatttgttttttgttttttgttttttgcttttgagacggagtcttgctctgtcgcccaggctggagtgccgtggcgcaatctcggctcactgcaagctccccttccggggttcatgccattctcctgcctcagcctcccgagtagctgggactacaggcacccgccaccacacccggctgtttttttgtatttatagtagagacggggtttcaccatgttagacaggatggtctcgatatcctgacctcgtgatccgcccgcttcagcctcccaaagtgctgggattacaggcgtgagccaccgggcccagcctttttttttttatttttagtagagacaggtttcaccatgttggccaggctggtctggaactcgtgacctcaagagatccacccacctcggcctcccaaagtgttgggattacaggagtgagccaccgcaactggctaccatttctaataaaagcaaacttttgttcaagtgtattcatcaaaaaggcccctcgcatgtgaccacagccaagccaggaagccttcttcaggtatccctagccagcctgcaggaggtcttggaaacttgttcaacggataaatataactgggcccacaaagaatcacaggaatacttaatccctccagcctccagggccagcctggccccagctgtgtaggggggcttagaagtgtcttcaggactcatctaactaccaggcccaatctggcggtgggcagaacctggggcccttcccacagcagtccgaggaccttcctgactgtgatcctggccccagcagggggacctagaaaacgccaatgaagctgtgggcaagcaggcaccaggtgggaaagcggccaagctcagggcaccctactccgctcacctgcgacggcagcagccagtccccacgggcggaggggacctcatgcgacattcagcccgcgagattctcagagactgctcgcccgcaacacgcagtaacgatctcaggagagcccatgatggggcggcgcgtgtcgtagccgagaagactctgtcatcgccggcgacctcctggaactctctcttgcggtttgcagccagatcacttcccatacacgcggcagccaagctcaggggatggcatcagactgaccctaggtggcgctcgaacacccgccggacctcaccagacaggcactttccccagtctacaccgcctggttcgggtcccacatgaacctgtaatacactcggcccaaagcggtcagaggatggcctggtgggcccggggcaccctccacggaactccctgaatggccagggctgatcccagcctccataggcagacagaaaatgtgaatgaagccctgctggatgcctcatgcctaccacctcaacactttgggaggccgaggcgggaggagagatgtgccctggagatgatgcagtgcgctatgatcgcatcattgcacagcagcctgggtgacagcgagactcggtcgcgggaaaaataaaacaaaaaacaaaaacaaaccaaaaaaaatgaaagagagagggagagggagggtggaaggagggaggaaggaagggagagagggagggagggaaggagggaaaaagaaagagaaaaggaaaaagaggccgggcgcggcggctcacgcctgtaatcccagcactttgggaggccgaggcgggcagctcacctgaaattgggagttcgagaccagcctgaccaacatggagaaaacccttctctactaaaaatacaaaaattagctgggtgtggtggcgcatgcctgtaatcccagctactagggaggctcaggtaggagaatcgtttgaacccgggaagagcaggttgcagtgagccaagatcccgccattgcactccagcctgggcaacaagagtaaaactctgtctcaaaacaaaacaccaaaaaaaaaaataaataaaaaataacccacaagagtgaaagtctgtctcaaaaaaaaggaaagaaaatgaagaagaacattcaagatggaaggaagggagggaagggaaagaaagaaaggagggagggagtgagggagggaaagaaaaagaaagagaaaagaaaaaaaaggaacatttgggaaggcccacaggggaatgaagccacaacaatatcctactcagaacctccttctcccatcaaaaccatccctctacctccccttccccctgctttccccgccactgcttctgcggctcccagtgatccccctccttttaccctccccgtccctctcttcatgcccctattcctatctcctatcactcagaattggcaacgttttcagcaggtgcttcagacgcgtctgcataggactgtgaccaagtccaagtcgcccacccttagccctccctgtttggccccagtcatccctccagacgttttctgaaggtgtccgatgaatggtcgccatggaaactgcagctggggtctgggtgccctccttcatcctccctgtatgcctgggcgagtgtcccttcttaaaaggggccttgggaaaaatttcaggacgcactttctgcgacggtaccttatgtgagtcggtgggcaggagctgtgtgccctctggggtccctggctgcgatcctggccccaggaaggggacctagaaaacttttccagtaggctgggcatgggctcatgactgtaatcctagcagtttgggaggccgaggcaggcagatcacttgaggtcaggagtttgagcccagcctggccaacatggtgaaaccccgtctctactaaaaatacaaaaattatccgtgcgtggtggcacgtgcctgtaatcctagctactcgggaggctaaggcaggagaatcgcttgaacccaggaggcagaggttgcagtgagccgagatcgcgccactgcactccagcctgggcaacagagcgggactctgtcttcaaaaaaaaaagaaaagaaaaagaaaaaaagaggcccggcgcggtggctcacgcctatgtaatcccagcgctttgggaggccgaggtgggcggatcacgaggtcaggagatcgagaacaccctggctaacacggtgaaaccccgtctctactaaaaatacaaaaagccgcgcctgtagtcccagctactcgggaggcggagtttgcagtgagcaccactgcactccagcctgggtgacagaccgagactccatctcaaaaaaaaaaaagaacgaaaatgtatccagtgatgctgtgaacaacccggcaccagatgggaaagcggctgagcccagggcgccctaccccattcacctgcgacggcaccagtcggtctccaagggcagagggaccttcatacgccactcttcttccgcgattctcaaagattcccatcccgcagtaatgatctcaggctcccccggatcccgcagtaactatctcaggagagtccattatgcagcaccgcgtgtggccggccgagaagaccttgccatctccttcggtctcctggaacactgtcctgggctctccggccggatcttgtcccacacacgcgacaaccgagctccggggacgatatcagagtgatcacaaagtggcgcccgaccaccggtgggactgcgccggacctggaccttcccctaccggaccagatgccacctggtcagggtctcactccaacttgtgtctcggcccaaagcagtcagagggtagcctgctgggcccgggccaccctccacggattccctgaatggccagggctgattcccagcctctacaggctggcttagaaaaattagggagaggctgggcatggcagctcaagcaagtcatcccaacactttgggaggctgagacggggggattgcttgagcccaggattctgaggttgcagtgtgttttgatcaggccagcacactccaacatgggtgatagagggagtcccagtctcccttcccgggttcatgccagtctcctgcctcggcctcccgagtagctgggactacaggcacccgccaccatgaccagctaattttttgttgttgttttttttttttttgtattttttaggtggacaggaagtagaatttattggtgagtattaagaggggggcagcacattggaagccctcatgagtgcagggcccaccacttgtccagagggccacgattggggatatacttgaccccacagccatctgggatgagccgcttttcagccaccatgtcttcaaattcatcagcattgaacttggtgaagccccacttctttgagatgtggatcttctggcggccaggaaacttgaacttggccctgcgcagggcctcaatcacacgctccttgttctgcagcttggtgcggatggacatgataacttggccaatgtgaaccctggccacagtgccctggggctttccaaaggcacctcgcattcctgtttggagcctgtcagccccagcacaggacgacatcttgttgatgcggatgacgtggaaggggtggagccgcacccggatatggaagccatctttgccacaactttttaccatgtacttattggcacaaattcgggcagcctccagggcttcagaggacagctgctcatattcatctgacaccatgtggccacagagcggaaactcatccacttttgcctttttccgccccaggtcaaaaatgcgaatcttggcatcagggacacctcggcagaagcgagactttgggtacggcttgttcttacaataccggtaacaacgggcggggcggcggcccatggcgacaccaggatcttcagtggcacactgaagggaaagagaaattttttgtatttttagtggagatggggtttcaccatgttggccaggatggtctcaatccggagactttttaaggttttcagggggttcatcctgtggccagattctatgcagcaggacaactatgctggggtgcccttctcgggcctctctggctcacctgtaataatccttgtctttagagggtgacttagacaaattttcaaggagcacatccaggaaccaggccccatgtgtgaccaaaactaagcctgggttgctctgccctatggttcctagctgacctaagctgtttccttatccccaccccatccccaaggacttacaaatatttcctggaggcacatcccacaatcagaggcctctgcaggatgacagcccacctgtggtccttctgctggcctccttctttggctgcgaccagtccctaccactggctgggacacaggaaactttgcactcagagcctcctatgaaggagcccacatggggctgtgggcaaactcaggtcaccctctccaggcctctctggttggccaggtccaatctctcttcctggagagggacttataaaagttttctgcggaggagtcacatgttaaaacagggacgcatgtgggaccagggctgagcctgaagagtactccacagtcctccttactcagcccaggccagtcactaccataggagagggacttagaaatatttttggtgggggtgatacctccagtaacaggtccaatacggcagacaggtgcagggagcccttttcaggcctcacaagctggcccagccctccgtcaagaaggaaacttgaaaaagaacacatctgggctgggcgcggtggctcacgcctgtaatcccagcactttggaaggctgagacaggcagatcacggggtcaggagatcaagaccattccgccttacacggtgaaaccccatctctactaaaaatacaaaaaactagccgggcatggtagcaggcgcctgtagtcccagctactcgggaggctgaggcaggagaatggcgtgaacctgggaggcagagcttgcagtgagccgagatcgcaccactgcattccagcctgggcgacagagcgagactccatctcaaaaaaaaaaaaaagaaaaagagcacatctggtgaccatgccccaagtgggaccacagcagagtgtcccctggcaccccaccctggcatccctaggtggcccatgctaactggcccattggaggggttctcagaggaaacattagaggaccaacatgataccaccctccctgggcttccctgtccaccctgggccagtccttgtcatcagagggggcctaagaaacatatgctgttggtgcttgcaaactgaccccagaacacttaaaaactttttatttgtatttatttatttttttgagatggagtctcactctgtcaccaggctggagtgcagtgacacaatctcgcctcactgcaacctccgcctcctgggttcaagtgattctcctgcctcagcctcctgagtagctgggactacaggtgtgtgccaccatgcccagctaatttttgtatttttagtagagaaggggtttcaccatgttggccaggatggtctcaatcccttgaccttgtgatccatgtgactcagcctcccaaagtgctgggattacaggtgtgagccaccacgcactgcctactttttttttttttttctagagacagggtctcactctgtcacccaggctggagtacagtggagccatcatggttcactgcagcctcaaacttttgggctcaagcaatcctcccacctcagcctcccaagtagtagctggggattataaatgcacgccatcctatctggataattttctaatttttaatttttttttcaagagataggatccagactggttgcagtggctcatgcctgtaatcccagcactttgggaggccaaggcaggtggatcacttgaggtcaggagtttgaggccagcctggccaacatggtgaaaccccatctctactaaaaatacaaaaatgagccaggcatggtggggggcgcctgtagtcccagctactcggaaggctgaggcaagagaatcgctagaacccggaaggcggaggttgcagtgagccaagattgcgccactgcactccagcctaggcgacagagggagactctgtccctcacacacacacacacacacacgaagagataggatctggctctcttgcccaggctggagtgcagtggtgtgattatcacttactgcagccttgacctcctgtgctcaagcaattctcccaagtagttgggaatacagacacttcacccagctaattttttaaattttttgtacatacagggcctcattttgtggcccaggctagtctagatctcctgggctcaagtgattctctctcctcagcctccagagttgttaggattacaggagcaagccaccacacccggctctgggtcataaattctgtccccctctaacaagcaaataacagacaaaaaaaacccacactcagtcacagagcgacctgagtcttagtagtagcgttttaatggcagcagccccaagaggagagtcagagtctggtctgcccccggagcaggaggcttgggcttggagggcccatcccagcagacctaaccatccacctccttccattgaactgaggccaggaaagtgcggatttccatgggttccagcgtgatgttggccgggtccagctggtacggagtttggtggggtgtggggcctggagaggtgcagggggaaggaggagtgaggaggtgcagacttcctctgactcaccccacgatgcttcctcccctgggtctagacacagctgcatatccccgaatctgtctccagggcctcaatcccagactcttaacctgcttccccggccccgaataccacccccaggtccaatgtcctcataccctcaatctggccactgtcctcgtaccctcaatctgaccccaggggtgatgaacaccctcccagaactagacatggatggggattttcaaatcttgttcttgggactaaacagcacccacaaacctcaagacccattcctggtttgccgcacccatttcagatcctttaagcccctaacctgggtctggactctgccccataccctcatgacctttttgggtcctggccaacatcccatgcctcacacattgcccccacctgccggccccaggtaagactccaccccttccctacccctgaccagggccccacctgtgtttgttgtccacttgagcctggaggctgcctcgcggagctggttggccaccagcgtggtctcctgcaggcgggtgatggtgaaggtggagaacaggtcctgcggggaaggggatgggcccagatgagttggggcaaagccaggtttctcttctctccctctctcttgcctctctccgatctccttctcaattttgcccttctcaccctcaagttcaaggtaacgggggcgctcaggttacgtccggaatcctctcctacggcaaactggtgctccaagcgcagcagcaccatttcggggccccagctggccagcgtgagcaggtgcaccgagggcggcaggtccctgcgcagccctgagaactgcgggagagagggcggggctgagttggagaggggcggggcctggatggagaagggcggggccgagccaggtcaggaggcagggctaggttgtaggggcggggtttcgccggagaggggcaaggctcagccgagaggagcggccagggccgtgacagggaggactgagccaatggggagatgggtcggtcccaagcttagggttcgagtcccgatggagcagaactgatgtgacctgagactttgggagttacggcggggctgaagccgcggggctgggtgaggcaggacagagcctgggggcggtgagagggcggggctaaagtgaaatgggcggggccggaggtgagttggtggtttaggggcatgagctagggctgtgcctctacacagtccaggggggttgggactgggctggcactgggcggggactgcccaggggatggggttggcccgagggtttggggctaattatggccaaatggatccccgctgagcctaggaaactccgcacccaaacccggctccctggtagacttcaatccggtcctctctgcctaccccgctgcccctcacctgcgtgcgcggaggagccccgagattgtaggcggcgccgccacccggggccagcaccacctgaggggccaggacctcctgctccgccaggagccggtgtccggcggctgcagcctgggctgtgtccagcagcaccaggtggcgccctcgcacccacgcccccgacccgttctccattagtggctccgatactccgcgtccatcgtccttcagcagccttcggtgcacctggggggagagtggccaggagggggtgagagtcgtgggtttgtgggtgtccttgggccagaaactgggtaagggcgtgtgggaatgtcaaaagaaattaaagggtgggaggaacggatgaggatgaaggtgagggtctggtagggcaaccccagcagaggcaggatccaagtaggcatgggaaccaggccggaaggaggtaaatgcctaacaggggggcctggatatggcacgccagagcgtggagggagcctgggcaggagatggagaaaaacggagaggaaaagccacacacagaaatggagtccttggccgggagcggtggttcacgcctgtaatcccagcactttgggaggccgaggtgagtggatcacctgaggtaaggagttcgagaccagcctggccaacatggtgaaaccccatctctactaaaaataccaaaattagccgggcgtgatggtgtgtgcctgtaagcccagctactcggaaggctgaggcaggacaatcacttgaacccaggaggcagaggttgcagtgagctgagatagtactattgcactccagcttggacaacaagagcaaaactccgtctcaaagagaagaaaagaaagaaacggagtcctcagcttagtggggcctgaaagcagagaactgggccagaaacagccttcaaggtccagcaggggtccaggttgggaggaccctggctcggatggggctctgacccactcaccatgagctccagcgagccatctctcaggctgctgcccccctgggagcggtcagtcagcacagtcagctgcatgtttccatcctgggagttgaagggtgaaagtagagggcagtcaaccccaaccccaggcagctttgagatgctgcagataaggggtgattccctttctatcgaggtggggaggtgcaggatgggggagagctaccgtgatgtaaatccgggtgttgactggatagtagtttcctgccacgggctccgtctggttcagtttccaggtgggtcgataatcccgcctggggttgggggtgagctgatcaggcttgggatctggctccccaactcttttttttttttttttttttttgagatggagtctcgctctgtcacccaggctggagtgcagtggcgcgatctcggctcactgcaagctccgcctcccggcttcacgccattctcctgcctcagcctcccgagtagctgggactacaggtgcccgccaccacacccggctgatttttttgtatttttagtagagacggggtttcaccatgttagccaggatagtctcgatctcctgaccttgtgatctgcccgcctcggcttcccaaagtgctgggattacaggcgtgagccactgcaccctgcctggctcccccgcccttcactctcccttcgtcctctgtctcccacactcatgtaatcagcaaatttccctcaccacccctgggccccaacacaccacagaccaccccctcagtgctctcagtcaccccccacctcctctccaggatctcccggccattgctgtctgtgtagaagcgtccctttgtctccagcggtgtgtcaaaacggctgatgacctccttcccccaggtgtcgctgtacccaatgggatggcaaggttgtgagccttggataaacccctctgcccttgcttccacacccctctcccagcctgtgccactcaccccacaggtatcggccccaccgaccactctagctccaggtgccgctgtcctgggtacaggcgaaccacctgggaacaccaagctgagaagttctggtgcacctcctgcaccaagggtgtctgcgggcacacgggtgaggtggatgtcagtctgtacctgagcagaggtgagtcctacaaatgtcccccaaccctggccataaaccccattaaggcctacatcaaggtcaaccttcagtcaccgccacataattctttttttttttttttttttgagacggagtctcgctcttttgcccaggcgggagtgcagtggcgcgatctcggctcactgcaagctccgcctcccgggttcacaccattctcctgcctcagcctcccgagtagctgggactacaggcacccgccaccacacccggctaattttttgtatttttagtagagatggggtttcaccgtgttagcaaggatggtctcgatctcctgacctcgtgatcagcccgcctcggcctcccaaagtgctgggattacaggcgtgagccaccgcgcctggcccacataattcttttttctttttttttttttgagacagagttttgctcttgttgcccaggatggagtgcagtggcacaatcttgcctcactgcaacctccgcctcctgggttcaagcaattctcctgcctcagcctcccgagtagagggattgcaggtacctgccaccacccctggctaatttttgtatttttagtagagacggggtttctatccatgttggccagacttgtcttgaactcctgacctcagatgatctgcctgcctctgcctcgcaaagtgctgggattacaggcgtgagccactgcacccggcctctttttttttttttttttttgagacagggcatcactatgtaggcacctaatcagcaaatgctcccacctggtcttgaactcctatgctcagcgatcctcctgcttcagtctcccaaagtgctgtgattacaggcatgagccactgcatctggcttaccacatcactcttgagcgtggcataaacgcctcctgttcaccattgccccatagaataggattctagcttggcacatggctacctgggataaagactatattgtccagtcttccctgaggctatcagtagctgagtgaccagtttgccccatagaaagtgatccaagtggtgtcaacaatgttccttgcccctgtccctctgctactgactcaaacacaaatgtggcggctggagcttcagcagctatcttggaccatgaggtggaaactgaatattggggaaggcagagcaacaagatagaagaggaggtcctgggtgattatggaaccaccccactttctctggactaacagccagactttttgttagaagaaaataatcttctatcttattctagtcacagttaatttgggtaactctgttagaacaggcaaaactatatacagatatgcagacattcatctcaaagggactcacatgaaacgcgaggctcttgaatgtggacaaatgtgagttttgtcatctatgaaagtcaaacatcaatgagaggccctgggaaaccactgttcctagccagatgcacccataggcattcaccctgagactcacccaaacccaatcaatccaagggtggactctcaaatattcactccagatagaagctcctcttactacagactttggtgaattcttcaagcagtgatatttggctctcctgattcatgggccaagtgggaatgccccacccccaatttccaaaactaagtatgtaaacgtccacagcagatgtgaatggctttgtatgatgtgtcctatggggagactctcatacgaccagctatgaatatcaattctatggaaggaccctcaaatatttcccccgctgatctgtgggtcttagcccactgatctgaaggaaaagtaaatcctcccctaccctcactctacacatggcccaccaccctcttgggctccataacttccccattcccaactgcccactcatcattcctagtccctgaccttcaccaggtggatctgagcccagcggctcacaggcagcggtttctgttggttgggtctgaagatgtaggcacctgaggcctggtcactttcgttgtcacctatactggcgttgtacctggagttggggcaggtgagagtcaggtaaggggccctagctccatgccgagcaccaccaccccaccctcaggcctggtgatcttcccttaccagaagaaggtctggcgaacaggcagcaggagttgctgattcatgttcataatctccatcaacagccctgtgtcaggatcaaacgttgcccggatgtgctgggcagaaaagggtccacagatgggtttgtgtgtgtatgtgtgtgtgttttctttttttaatttttcttttttctttttttttttttgagactgagtctcactctgtagcccaggctagagtacagtggtgcaatcttggctcactgcaccccccacctcccgggttcaagtgattctcgtgcctcagctatccaagtagctgggattacaggtgcccaccaccccgcctggctaattttcatatttttagtagagacagggtttcaccatgttggccaggctggtctcaaacccctgaactcaagtgatctgctcaccttggcctcccaaagtactaggattacagacataagccactgtgcccagccggatttttattttttttttttgagacagaaacttgctgtgtcgcccaggctggagtgcaggggcgcaatctctgctcactacagcctctgcccctgggttccagcaattctcctgcctcagcctcctgggtagctgggattacaggcacatgccaccatgcctggctaatttttgtatttttagtagagacggggtttcgccatgttggtcaggctggtctccaactcctgacctcaggtaatccacccgccttggcctcccaaagggctgggattacaggcgtgagccactgcacctggcctgggttttttgttttttttttttttttgagactgagtctcgctctatcgcccaggctggagtgcagaaagtggcgtgatcttggctcactgcaacctccgcctcccgggttcaagcaattctcctgactcagcctcctgaatagctgggactacaggcacatgccaccacacctggctaatttttgtatttttattagagacagggtttcacaatattggccatgctggtctcgaactcctgacctcatgatccacccccccctcagcctcccaaagtgctgggattacaggcatgagccaacacgcctggcccctttttttctcaatttaaaatttttttagggccgagcgtggtggctcacacctgtaatcccagaactttgggagaccaagttgggtggataacctgaggtgaggagtttgataccagcctggccaacatagtgaaactccatctctactaaattaaaaaaaaaaaaatttaaatttgttttctagagatgggggtcccactatgttgcctggggctagtgtccaactcctgggctcaagcagtccaccacacccagccattcaacctgattttttttttgtttgcttttgagacagagtcttgctctgtcccccaggctggagtgcagtggcatgatctcggctcactgcaacctccacctcctgggttcaagtgattctcctgcctctccctcccgagtagctaggactacaagtgtgtaccaccacgcccagttaatttttgtatttttggtacagacgaggtttcactgtgttggccaggctggtctcaaactcctgacctcaggtgacctgccagcctcagcctcccaaagtcctgggattacaggcatgagccaacgtgcccaccccagccttttctttttttctttttttttcttttttttttttttgagacggagtctcactctgttgcccaggctggaatgcagtggcgccatctcaggtcactgcaagctccgccttccgggttcacgccattctcctgcctcagcctcccgagtaactgggactacagatgctcgccaccacgcctggctaaattttttgtatttttgtagagtcagggtttcaccgtgttagccaggatggtctccatctcctgacctcgtgatctgcctgcctcggcctcccaaagtgctgggattacaggtgtgagccaccgcgcccggcccccccaaccttattttcaacctcaccacctcttaccagggccttccagggccagtgcagtcaaccccttccaggtccctgcacttccacactggctgcctacagtctgttccccacaacagccagagcacacctgtgataccctaagtcccatcaaagccctcctctgctgcggaccagggccaacttgggcatctgatgtgtgaaccacaatgccagaactcacaagacttttaggggcctgtgggaacgttttaacttcttttattttattttaataaaaatatgaaaaagatgttttcttcctaacatgaacagtcctactgcagaacttcttttattttattttattgagacagggtctcactttgtcacccaggctggagtgcagtggcatgatctcggctcactgcaacctctgccacctgggctcaagcaatcctccttcctcagcccccaagtagctgggattacagacgtgtaccaccacccccagctaattttttgtagagactgggtttcaccatgttgcccaagctggtctcaaactcctgagctcagtagatccacccacctcagcctcccgtggtgctagaattacaggtataatccacgatgcctggcctattttattattattcttttcagacagggtttcactctgttgccaggatggagtacagtgggacaatcattactcactgcaacctcgaactccccagctcaaacaaacctcccatctgggcctcccaattagctgggacaactcctgggctcaagtgatcctcccgcttcagcctcccaaagagctaggagtagacacatgagcaacaatgactggcaaaagccaaagtcttcctgttggtcctcaaggccctcaaggtctgacctgtcacccgttcaccctgcttcagccacactgagctccttgtggctcctggaattctgcacactctcctgctcgaaggcttttatgcctgttattctctccccacctggatctctcttccttcaaatagccacacggctccctccctcaggtcatatcttaaatgtcacctttatcgggaacaccttccctgaaacgtccctgccaaaattgcgaaccaccacctgccaccaactctgacatgtctgtcaagtgtcacccatgatcacactgggtcctcataacagtcccaggaaaggacactgaggctcagacaaaggtcacttgctcaaggacacacaatgaggggagttgtgacaggaggtcataagcctagggacctgctgacccagagtccacacagctcaccatgacacttcaaatttgtcacaggagcaggaaaggggattgaaatggggtctcacctcattttcgatggttaaagcaggggaccaggatcttctggggatgggctgtggtgcgcgggcctggggcttccagcgaggcacctgggctactgaataggtgctgaagcccagggcgggcagtgaggctgagaacagcagctccggagggtgcgcctggctgtctgagctgggaaatattaccacctcggataaaggaggagggaaactgagtcaagagtacccatggaaagctatacatgcatggagacaaaaaactcaaggaaggaaaagagtcctgagatggggaaaggaaatggaggtgtgtgtggtggggggacagtcagattccaaggaaatgattgcagagaagattcaccaggtggaaaaaaaaacccaccgggagggtggagagaccatggagtcgggggagtgaaggaggaagtaggggaagaaacccttgaggcaggttctcgggggaggaagaggtttgggggaggacgttttctggaatgaaggagatgtccataaacagcaataaattttcctggggaagcggggtattaaaatggaggaccagccaggcacggtggctcatgcctataatccagcaggcggagtttgaagtgagccaagatcgcgccactgcactccagcctgggtgacagagcgagactccgtctcaaaaaaaaaaaaaaaagggaggaccactcacaggaggcatatgttcccaaggggagactgatattaaggggcagagggagaagatacaagaggggggaagagatatgcatgagtgggaggtattcatggaagcaggcgatatccatgggggcgatgaggaaatgcccactgggggaggagtcccagcgggggaatattcgttgtttgggctcacatcgctgggcactgtcctgccattggggtccttcacaacgaaaacgccttcgctgaccggcagccgtaccatccaattcaccttccgccccaggggattataaacgatgacctggaactggggaggcgggggtcagagagggcatgggtcacagcaggccttctccaaacccacccactttgcacagaaacacccctggctggtcctagtgtggtcacggcacttaaggccaagccccctcgagatgcgttgttctctctgctgacccagcttcgcagcccacgtaatttcactcctgtatagtcctccaaaaacattttccaactaccccctctaaagcccatctgccctagatccacccctcccgtcccggctcacgcgcgccgccgtctggctgagcgggcagatgctgatgtttagctgttggcaaaaggtgaagtgatctttgaagcctctgagccgcgccagcgcgttgctcagaagaacctgcggaagagcgcaaagggaccggtgggttcaggacgccaggcctgactcctcccctctcctcaggccccgccccgttccggtctctgtcccgcctccctcaagagtcgccccaaaaccccttctagccccaccctgctgcccttgactataccccatagctgtctccgcctcctcttgcccacgccccgcctccttcccccctccaaagccccgccccgttcctgtatctttccccgcctcctacaagccccgcccccacgagcccttgtagccccgccacagggctctcggctacgcctcacacctgtctctgtcccctttcccaggccctggccccgccccttcctgtctccacccccgtgtctcccaagtctcgccccgcgcacctcgcaaggcccccagcctgccgcaagctggcgcgcgtagtcgttggccacgtgctggcgggaggtgccgctgacggcgtcgtgatgctggagcacagccatcgcctcatctgctcatagacaatgagtccggtgaggttctgtgggactcagctgagaccccaaggggaagcgaaaggtccggtgctggcgggcaggattcttagaggctttaagaaggaactcgaggacggctgggggcggtggctcacgcctgtaatcccagcactttgagagaccgaggcgggcggatcacgaggtcagatcgagaccatcctggctaacatggtgaaaccccgtctctactaaaaatacaaaaaattagccgggcgtggtggtgggcgcctgtagtcccagctactcgggaggctgagtcaggagaatggcgtgaacacgggaggtggagcttgcagtgagccgagatcgcaccactgcactccagcctgggagacaaatcgagactccgtctcaaaaaaaaaaaaaaaaaaaaaaaaaaagaagaaactcgaggggggcggcctaggggtggtttccaacttcagccgcaaacctcttcccctcttgggcccgacacttactgaggggtgcactgtctccggagccatagggtcccacgttggccgccaggcccaccagcgcctccagctggttgcacacctggaggcagaggggtatgttggggcgcccagcctgtcgggcctcggggctgcatgccccctctagcccggctcctacccacctgcaggaagttgtagctgaggcgctcgtagcgtttgagggccggccgactggaaaagtaaccggtccagaactggtgggggccatccgcgtaagggaagaagtcgtcatgtttcactgacctacagcggcaggggcattgagggcagggtcatgacccacggggcatgccaacccccccaagctccccagtttccccaaataccaggtgaggttggccttgttcagctcccagaggtaacaagcgggggtggagtagagaacatggacactgcttccttttgcctgctgctgggggaggcgacggagtgagccctcgggagtccgcaccttcctgggggcccacacttccacacatgtgtgcacattcatgcatcccataggttcagtttctctaaatacatatttggcgtgcaagccaatggttgggtgtgaaaatgaattttggctgaagtcaaacatgaccactagccttttttaaaaggatttcagagatgcaagaataaacctgaaattttactaaacttttacaataattccaactttattattaaaaacttttgtggaaaaactaagtgtgacattatagggcaggaataatcgttttgcaggactgtcagattgttaccaaaaaacacaactttttttttttgggacggagtcttactttgttgcccaggctgtagtgcagtggctcaatctcagctcactgcaagctccacctcttgggttcacgccattctccagcctcagcctcatgagtacctgggactacaggtgcccgccaccacacccggctaattttttgcattttttagtagagacggagtttcaccgtgttagccaggatggtctcgatctcctgacctcatgatccgcccgcctcagcctcccaaagtgctgggattacaggcatgagccaccgtgcccggcctagacacaatttttataatgaatggaggtgcactttcacctgagcaaggtggaggaacaagaaagtgacctatgtgaggaaaaggatgtttgttttgcacgagctgtgtcccccaatgtacacagtaggtgctcaataaacttttttttttttttttttttttgagactgagtctgactctgtcgcccaagctggagtgcagtggcacgatctcagctggctgcaaactccgcctcccaggttccagcgattctcctgcctcagcctgccgagtagctggtcttacagatgagtgccatcacgcccacctaatttgtagtatttttagtagagacaaggtttcaccatgttggccaggctggtctccaactcctgtcttcaagtgatccgcccacctcagattacaatcccaacactttgggaggccaaggcggacggatcacctgaggtcaggagttttgagaccagcctggccaacatagtgaaaccctgcctctactaaaaatacaaaaattagccagggttggtggcacatgcctgtagtcccagctacttgggaggctgaggcaggagaatcactagaacccaggaggcagaggttgccatgaggcaagatcatgccactgcactccagcctgggtgacaaagcaagactcttgtctcaataaataaataaataaataaaattttaaaaagaaaaaataaataaaaataaatgacataaaagagctgttttggtgaaatagcagtgctgggagcgagtggaaggtgggaatggagattgcaccgtagtgaggacaagattgatgggaaggggtgtctgagatgggagaggggagacaagtttctgtgctgatgagagtgactgactgtgcacacagccacagccacaggccacttagtgcaaaacactaacacatctgtgttgggtaaaatgataactgcccaaaagtgtccatgtcctgatccccagaacctattaccacattagattacatggcaaaaggggaattaaggttgcagatggaattgaggttgttcatcagccaaacttaaagtagggaaattaggccacacagtggctcacatctgtaatcccagcaccttgggaggccgagcggggtggatcacgaggtcaagaaatcgagaccatcctggccaacatggtgaaaccctgtctactaaaaatacaaaaattagctgggcgtggtggcacgcgactgtagtcccagctacttgggaggctgagacagaagaatcacttgaacccaggaggcggaggttgcagtgagccgagagcacgccactgcactccagcctgggcgacagagcgagactccgtctctaagtaaataaataaaatgtggaagagagaggcagaagaggtgagaatgagagaaagggatgtgattacagaaacagggtcagaaagatgctatgtggctggctttgaagatggagccaagaatagattttgaatgtgggtaacttctagatgttggaaaaagcaaggaaattatattctctcctagagactgcagaaggaacacagccttgccaacaccttgattatagcctggtgagactcaggctggattttttttttttttttttttttttgagacagagtctttctctgtggcccaggctggagtgcagtggtacaatctccgctcactgcaacctccgcctcccggattcaagagattcccctgcctcaggctcccgagtagctgggattacaggcacgcaccatcacacccagctaatttctgtatttttagtagagacagcgtttcaccatgttggtcaggctggtctcgaattcctgacctcgtgatctgcccggctcagcctcccaacatgctgggattacaggcatgagccattgcgcccggcctcatgctggacttcttacctacagaactgtaagacaatgtatttctgttgttttgagctgctaagtgtgtggtcatttgttatagaatgaccacaatagaacaatagaaaacaaagacagcactgagagctatgcacataacccaaggcccccggatgcaagcgcacatgtgcacaagggtaccacagggtaggcgcactgacctgcgcatttaccagccggatgagcttgtcaaggttcttgaaccacatgttggcattctcatattggaagtccgagcccatggtcatcacagtgtggttggtgcggtaataccggccctgcaggcaagaggggagtcctgaagccagaggatcctgggccatccctgtgtatagctgtgttttgatgtatatggggtcaaggatgttgggtgcacaggcatgggtgggggtatggcacttgggagcgtggggacacagataaaagtagccaccagttgttgagcagttctcttggacccactacctagaagagggcatccagtcaccatgccatgctatctcttgcccagcctatgctatctcttctaatgaggaatgcacataaatccaggagggggacattgtgatggtgaatagaatagcatcttcctccagggggcatgagaacatgattacaggggctcacacctgtaatcccagctactcaggagactgaggcaggaggatcgcttgagtctaggagtttaagaccaacctgggccacacagcaagaccctgtctcaagaaaaaaaaaaaaaattaatctaaaacaattttttttttgagacagagtttcactctgctgcccaagctagagtgaagtgacgtgatctcggctcactgcaacctccacctgccaggttcaagcgactctcttgccttagcctcccaagtagctgggattacaggcgtgcgccaccacacccgactaatttttgtatttttagtagagacagggtttcgtcattttggctatgctggtcttgaactcctgacttcagatgatctgcccatctcggcctctcaaaatgctgggattataggcgtgagccaccatgcccagccatcaatttttaaagaaaggaaaaaaaaatttttttaaggagaacgtgttatgccaggcatggtggctcacacctatatcctagcactttgggaggccaaggcaggaggatcacttgagttcaggagtttgagaccagcctgggccacatggtgagaccttatctctgtgaaaaaataatgttttttaattataaaaatgttaaaggctggacgcggtggctcacgcctgtaatcccagcactttgagaggccaaggctgtgggtcaaaaggttaggagttcgagaccagcctggccaatatggtgaaaccccctttctactaaaaagacataaaacttagccgagcatggtggtgggcacctgtaatcccagctactcgggaggctgaggcagaagaatcgcttggacccagtaggtggaggttgcagtgagccgagatcgtgccactgcactccagcctgggcgacagagtgagtctaaaaaaaataaaaaaggaattctcaataaaaatgttaaaaatagactaggcacagtggcccacacctgtaatcccagcactttgggaggttgaggcgggcagatcacctgaggtcaagaccagcctggtcaacatgacgaaaccctgtctactaaaaatacaaaaattagctgggtgtggtggcaggtgcctctaatcccagcttcttaggaggctgaggcaggagaatcgcttgaacccgggaggcggaggttgcagtgagctgagatcatgccactgcactccagcctgggtgacagagcaagactctgtctcaaaaaaaaaaaaataataataaataaataaaaatgttaaaaatagaggccaggtgcggtggctcatgcctgtaatcccggcactttgggaggccgaggcaagcagatcacttgagctcaggagtttgagaccagcctggacaacatgatgagaccccagtgcaaaaatacaaaaattagctggatgtgcttgtttgaacccaggaggcagaggttgcagtgagccgagatcgcaccactgcactccagcctgggtgacagagtaagactgtctcaaaaaaattaaaaataaggagaacgtgttaggggatgcctgtaccatggaaagagctcattgtattgtatataccggactcgaaggttctggacaccagggttacctgggcagtggccacatttaggaagtaatcgaccagctccttggcgttgtactcggggctgcgagggtcctccaccagcggctgatcgacacacagcacatcccagcacagattccttggcgggttgtaaccattgggaagcacacctgcaggtcacaccaagttcaaggggtggcccatcacccagaccttccctggtttcaaagccggccatgtcccacccaggatgggcttcagaatttgtgtcccaatgcaaaaggaaatgcagggcctttgttcccagactataggaattccaggacagtgacaacagagcagatatcaagcccagggcccttctgagtgtgtggcaccatggctggccctgccctcaccaagccccctaccagtgaagaggtccgcggtcgggggcttcaggctggtgctggcccgccacacctgctccatctccagcttctgcatccgtacccacttatcttgataatcaaggcgcccaaagaagaagccgtcgaagcccatctggggatgagggaggaaaaggcagtgtgaattagtgcccagccctctcaccaccaaactcccctctgcttgggaggggcaggtcagagcacaggttaaaaagcagtgctaggtcgatgtggtggctcttgcctatgatcccagccttctgggaggccaaaacaggaggatcacttaaacccaggagtttttgagaccagcctgcacaacacgggcagactgtctacaaaaaatttaaaaattagccaggcgtagtggtgcgctcttgtagtctcatctactaggggggctgagacaggagaatcgcttgaatccgggagattgaggctatagtgagttaggattgcaccactgcactccagcctggatgacagcaagaccctgtctcaaaaaacaaaaacaaaaacacgtagggctgaaacagagaggcctccagcttatttccaagcttggggaagtttcagaactcaccaccttgggctagcagggagagggcgggtccaacatcagaacccaggttcacctccccagcactgtcaaagcgcagagcaggcctgactccaggaatgaggttcccccttccacagcctgaggatggatggggtctgagcacaggtaatgaacctgtttttaaggcagcctaggcatccacttgccacccggtttagggaggagccaggacccgagctagtgggtggggccagaacaccaagaggggcctattaggggagagggcggagccagccggagctgggtcagcctgggctgggcatagccggctgaggccagagctcaaaagccactggctttacggctcactcaaggggcagggcttcaacaggcctaggcctgggcctggtccttgtgagattgcagggagagggcggggtttgactgggcgagggaggagccagagtgagtgaagaagtgggcccaagagaggtcccgggtcgcacctgcgcaaacagcgaggcctgctcccgagagtggccgaaggggtcaatgtgccaggccacacggggtcgcccatcattgccaaatgtgtcctccagaaagcgcagcccaagtgtcatctggtccacgatggcaccgtagtgggtggctgcctcatcgttcatcacccagccaccattggcgaactccaggcgccctgtgccaggacaggcaaggtcagggtcagcggtcagagccaggagtgggagtagggtgggtgatactgggaatgtgaaagcctgcctgtgtacacatttctggcggaaggacaagaggggtcgctcccaggccatagttcccagatatgggaaagaggccccctgcatggcaggcttcccagaggatgcacagcaggtggggctttgtgggatgtataggaggtctccaaatggagagtccaggcaggcggagcgacacgcatgttatacagcttgcacgtggcatgacaaatctcagaaaccagagatgcagaagcagaagctgggctgggcttcctcttttcacttccttggggtaggctcaccctggcgcacaaggtctcgcacgacttcctgtgtggcatttgtctgctggtgccaccaacgggagaagaaggcaatctccacgtaaatgaagcgacgggtgggatctgccagcaaggcagagatgaccgagtccaggatgtactgcacaccggcgtgctggatgtcattcttgactgtggataacagggataaggctctcagggaacagcagagccaagggggttattcctagacagaggagcccaaaccctggatattagggtagcactggccccaccctaatgtccaggacccagagggattacagggaccatggggatcccagggaccagtccccatcctctactcacttccataaaagtactggtccacggttttgagccagcccacgtcatcatgtgtgtgaggcagcaggtgcacgttcagcatgttcggctgcactgtggggcatgtctgcacagggaccccaaacacacataccttgtcaataacccccgaggtcgggggctgcagagtaagtcttgatctagaggtgagtgactcagagaggcctgatctcgcctatgtgcagaggaggccaggccctcccaggcaggacacacacatacatagttgtgctcatagatacaactccactttgcacaaccccacagggcagctctcattcacactccgggaaaataataatagaagtagctgatgtttgttcagcatttgccgacagcagacggccaccgtgggaggtggggtgatgttatccccagtttccagatgaaggcactgaggcttagagaggataggtgacttgcccaacgtcacacactcaggaagtgtaagagctaggctggaatttcaggcagactccagagtcccagctctcagccagcacctccccccacacatacactgctcaccccctgccacctcctgcccctccaatcccacagttaagtgcagacaaagtctaggcaagcatcccggagacacggaggcaggtacaatcagacacagtcctatactcagatgcgcacagccagacctcgcaatgacacaaagcacgcactcagaccacactgtcatatcatcagccattcactagacacccacaggacagacccacccacacctctagactgtattctgggtttcactctgcctcctgtacgtttcagctcggaggccccactcacctcgtatcccccggcccgagcaccggcagccgccagcaacaaaaggaaaaagcagagaggcgggagcggtggccgcagggcgcgggacatggtccaggggcctgctgagtccaggcagccgcgagcgcagacccccgaagcccgcgcgtaggcgcccatggctcagcagcttcctcctggggttccccggccctggaaaggccgggcaaacgccccgcccccagacccggccgggccaatcggggtggggggcggggccagggcgcggtctggaggctcacgggagagaggctgtagccctgggcaatcccgggggtcgttacaggaaggtaggaaaatgccaccctcagggcactggttgggctaaaggtgacactggcgtctcacgggctatgaagacggaatgcctcttaatgccggaattccaagacggaatgcctcttaatgccggtaggagcagaagtgcttttcctaagggggccgggttttcctagccggtgtagtgtgtccatgggaatccagggtgtccgtcccatggaccttcagcgctagggtcctggaaggacctagcttgcctaagaggaggatctgatgaagagtcctatactgtggggattgggacgttgggtaaatacccctggagtaccagggatgggatccagcctggttgagaaggatccctgggtgttccggagagaaaagagggtctgacaagtggggaaggaccccgagtctttcatgcctttcccaattcctaccagttcattctctgataagaaaacaaagcccagggcaggcgcagtggctcaagcctgcaatcccagcactttgggagggccaggctggtgaatcacttgggcctgggagtttgagaccagcctgggcaacatgggttgttttgtagagacgggtttgaaaacacaaaatttgtaattttacacaaaatgtaaaaatacaaaaattagctgggcatggtggcacatgcctgtaatcccagctacttgggagactgaggcaggagaatcacttgaacctgggaggcggaggttgcagtgagccgagatcaagatcatgccattgccctccagcctgggcaacaagagcaaaactctgtctcaaaaaaaacaagaattaactgggcatggtagcacgcatttgtggtcccagttacgtggcaggctgaggtgggaggattgcttgagcccaggagtttgaggctgcagtgaacatagattgtgccactgcactcagcctgcatgacagatcaagaccattttctttcttaaaaaggaaaaaaaaaaaaggaaaccaaagcctagattatctaggtcagcagggccatctggtgagttgccagagggcagaagtcactgtcttgtccctagcacctgacttaagacacaaggtttatgaagtaagcaaatgaacagccagaagcctccagactggggccccacaccaggcctatggggctagagcccttcccgccaggtaggaggaacaccccactgaacagaagaggctgacagccagagtgaaaaactttattaacaacaggtttcaacgagaaagcaaatgaatacccctagaaacatggacagcatctcccccagcagcaggcaggggaagggaggcaggaggggtaagcctagggtgttccctaggaaagggccaggttccctctatccagctgggggcaccgagacggcctcattcagggaagtccaggatggcagctgaaggcagcaggtttagcagccaaagcccaggcctagtggatagacagggtccaaaatgtgacccttctaggctggtatcaccatgggggcgtcatgggctgaggattctgcagataggacatcaccacggcagagatggacagcctgagacaggagagaggtgtcagtctaggatggccaggctggggtccccccaccccttactcaagagtcacttgttctgtagggcaagtctcacatgaagctactcatcatttgcttcgtgtcctccgagctccgagagttggcaaagctgatgaaggagcagtagacagcgacccaagcacaccacttcagctagggaaaggtaagtgggtgggcaggttagtgaaaggcacaacaatgagtccccgaagccacctttccagacaccagatcatgcccactgattccatctgatgcagctgggaccttgccccacccggaattcctcagtcccacctgctcatggcatactctagatacgtggtttctagtcctactgtctggcctgcgtctctcaggaccaagagagactctgacatcccacatgcttaagaccctgccctttttccacaactcctctccaagttgcttcaaagcctggccccactcgcagaccaatctgccacatccccaacctgactcgaatccttgacttcaccaaagactggggctttctcggcccagcgtcatcgcagccccactcccggccgatctcaggtcccgccccatcagcaatgacaagacaccccgcttcattccaaacccgcccccgggcctcgttctcaggtccaactacacccatagaagctcaaccccgcccaccttaagcatgaggccgcacatgctgaagatcatgcccagcaggttcatgtagtccggcgtcgggtcgtccaaggccgggttacattcgctcggcgggggcttgtacctgcgacaggctcgagggtcaggggcgctcaggtcctgcccccgggatagacaggcgcttcccagggccccgatccacacccacaacccgaacccgtgcccacgacgctggggtcctcacctcagcactttgttcggcctccgtgggtccgacatattgttagtggacatagcgagtcgaaggccagatcacgcctcttccgctgcaggaatcgcagcttccggcgtgcaagctgagggcggattttagagtaacacccgaggccctcgcatttccgttcctcatgacagaggcttggactccccttacccagagaacggagatttaggagaagccagaagtcttcctttcaaagggaaaatggggaaaagaacctgaaagcgggcttcaatagttccaacccgatcaccgaaatgccaaaatgatgaacccggaagtgataaacaggaagtaggtcaggaagaacaataataaggttacacccaagcgtgggtttctaaggcgcggaattttccgtacagaccgatttaaggctgcaaggaaggagtcctgggagcatggctttccctgagccaaagccgcggcctccagagctgccgcagaaacggttgaagacgctggactgcgggcagggggcagtgcgagccgtacgatttaatggtgagcgccttcgtcttcattccgggtcctcctcccgcctcctgagatcgacggcccagtaacccccgcctggtgttccccagtggatggcaattactgcctgacgtgcggcagtgacaagacgctgaagctgtggaacccgcttcgggggacgctgctgcggacgtacagcggccacggctacgaggtgctggatgcggccgggtgagccggggaccaggctgggatgggagcgctgaggctgggatccgaggtcgatgctgatcctcctcctcctttactccagctcctttgacaacagtagtctctgctccggcggcggggacaaggcggtggttctgtgggatgtggcatcagggcaggtcgtgcgcaaattccggggccacgcaggggtgagtgaaagcctggagaccctcatttgagtggaggggacccgtattagcgcataggtggtgacacggccacccccattacaccgtaaggatcccttccccagatgacgatcccccactccgcatgccaggctaggcagtcaccaacccctgtccttgctgttcccccaaaacctttcacctccccttcgcccttgctttaaccgacactgggaaccctgcctttatcccagtcctccaaagtccagcctcctctgagtggcaataactttctcagaaggtgaacacggtgcagtttaatgaagaggccacagttatcctgtccggtgagtctggggcctaagcacgggggcccagggtgctgccctccccctccaaacctgacctcaccatcatgctggcctcacaggctctattgattccagtatccgctgttgggattgccgctcacggaggcctgagccagtgcagacgctggatgaggccagagatggcgtgtccagtgtgaaggtgtcagaccacgagatcctggcagggtgagtggagccaggacctggtctcaccccaggtgctacggggaatcatagctgcccccatgctcagattaaaacctactctcagctgggcacagtggcacacagctgtaatcccagctacttgggaggctgaagtggaaggatcacttgagtccaagagttcgaggcaccattgcactccatgctgggtgaaagacagactgtctacaaaataataataatctggccgggcacggtggctcacacctgtaatcccagcactttgggaggccaaggtgggcagatcacttgaggtcaggaggttgagatcagcctggccaacatggtgaaaccccgtctctactaaaaatgcaaaaattagccaggtgtggtgacgggagcctgtaatcccagccactcgggaggcggaggcaggagaatcgcctgaacccgggagttggaggttgcagtgagccgagattgtgccactgcactccagcctgggcgacaaagtgagactccatctcaaaaaaaaaaagataaaatgatttctaaaaataaataaaaataggccgggcgctgtggctcatgcctgtaatcccagcactttgggaggcagaggcaggcggatcatgaggtcaggagatcgagatcattctggctaacacggtgaaaccccgtctctactaaaaatacaaaaaattagccgggcatagtggcaggcgcctgtagtcccagctactcaggaggctgaggcaggagaatggagtgaacccaggaggcagagcttgctgtgagccgacatcgcaccactacactcctgggcgatagagcaagactccgtctcaaaataagtaaataaattaaataaataaatacataaaaataatcataaggaagaatttttgttttttttgagacgcagtctcgctctgttgccaggctggagtgcagtgacgtgatctcggctcactgcaacctctaacttctaggttcaggcgattctcctgcctcagcctccctagtagctgggactacagtcgcgtgccaccacgcccagctaatttttgtatttttagtagagacggggtttcgccatgttggccaggagggtctccatctcttgacctcgtgatccacctgccctggcctcccaaagagctggaatcacaggcgtgagccaccgcgcctggtggaaaaaatatattttctattcattaagtggaagtgaagagatcgtcataaagatcttcgtgttgagaaagcagaggaggaggaagaggagggattgatcttggtgtctcacagctgatagaggcagaagaaaatccacatataagtggacgcgttcagttcaaaccgtgttgttcatgggtcaactgtactttgaaaagtgctccctctggtggctgtggggggtgcagggagaccagaacagtctagatgctggtgctgggtagtggggaaagtggtgggactgagtactgaggaggaggagctggagaatgcaggaaaagggggaattgggccaggtggggtggctcacacctgtaatcccagcactttgggaggctgaggtgggcggatcacctgaggttgggagttcgagaccagcctgaccaacatggagaaaccccgtctctactaaaaatacaaaattagcagggcgtggtggtgcatgcctgtattcccatctactcgggaggctgaggaaggagaatctcttgaacccgggaggcagaggttccggtgagccaagatcatgccattgcactccagcctgagcaacaagagcaaaactctgtctcaaacaaaaggaagaaaagggggaatcagaaggactccaagggcttggaaagggggtgtgggtcttggaaatgatggagtaggacgtaattggccctgggcctgagtctcaaggccagagcttcagaattccactcctgtgcactggaagagcaggcccactgggctgggaaggcacagggctgcctggagccatgtgagtgtagtcaaggttcccgctggatctaccctctcctgcagctccgtggatggccgcgtgagacgctatgacctaaggatggggcagctcttctcagactacgtgggcagtgagtgtggctggggatgtgggacaggcagggaagatggggggccaaccaggggcaccccaccctcactcacctacccacccttcccccaaggccccatcacctgcacctgcttcagccgggatgggcagtgcaccctggtgtccagcctggactccacattgcggctcctggacaaagacacaggggagctgctgggcgagtgagtccttgtggtcgtggggatccccttccctcctctcccacccctggagaggaccaagccccccgatcctgtccacccttaggtacaagggccataagaaccaggaatacaagctggactgctgcctgagcgagcgtgacacacatgtggtcagctgttctgaggacgggaaggtgttcttctgggacctggtggaggtgaggtgcccccagccctacttcatacctagatgcctgccccatctcagccctgtccttacctcagtcactccagggcctgaaggctaggatcttttttttttttttttttttttttttgagacaagtcttgctctgtcgcccaggctagagtgcagtggcgcaatcttggctcactgtaaactccgcctcccaagttcaagcgattctcctgcctcagtctcctgagtagttgggattataggtgcgtgccaccacacccagctaatttttgtatttttagtagagacagggtttcactatgttggtcaggctggtcttaaactcctgacctcatgatccacccacctcagccttcccaagtgctaggattacaggcgtaagccaccacacccggcccttttttctttttttgagactattgcccaggcaaatgcagtggcgccatctcagctcactgcaacctcttccccccagggttcaggtgattctcatgtctcagcctcctgagtagctgggattacaggcccctaccaccatacctggctaatttttgtatttttagtagagacagggtttcaccatgttggccaggctggtctcaaactcctgacctcaagtgattcacccgcctcggcctcccaaagtgctgggattacaggcctgagacaccgtgcccagcttgggctagagagaagatgaggcaggaagggcattccaggcaaagggaacagcatatgttaagaggtgtagcctgcgcatgcatcagtcaggaaacaaaggcttcagggtggcggcaggtgcggcaagatccggggtcaggctgggctgcagatgccaggccgagcaactggcactgacccctgggcaagggggagccgacggccatgtctaaccttgggtgagatagggctgcagtcattcaagaaactggagctacatcttagcatccctgtgcatggtttcaagccctgagccctgtccttgacatgtcccagcctggtggggagtcaggccagaaacagaccatcctggtgtagtggggtcagagccgggggaatctcggcaaaggagacatcagcgctgggcttggccaggggaactaaggcccataagaggatggagggaaccgggggggccctgaagacttggcggacaagctcttgctttaggaactaaggtagcaagaatgttccacctatttcttatgggcccagtagaacagaagttgccttggagggcaggcacatcaagggacattttcaaggtggaaagaggaagcatggcttgcttgaggaactgtttacattgtgttgggaccaggggaagtggggatcattggggctgccaaatggacaggatggagcccagctggtggcagggaacaggcaagctgtgagcaaggcatgctccaaacatggtagtggcagaaaatcagcagtctctggacatggtctagaagcagagccaagaggaataactgatagaggaacatgtggtacaagaaaaagactcccggccaggcatggtggttcacacctgtaatcccagcactttgggaggccgaggggggtggatcacgaggtcaggagatagagatcatcctggccaacatggtgaaaccccatctgtactaaaaatacaaaaattagctgggcatggtagcgcgtgcctgtaatcccacctactcgggaggctgaggcaggagaatcgcttgaactagggagtcggaggttgcagtgagcccagatggcgccactgcactccagcctggcgacagagcaagactccatctcaaaaaaaaacagaaaaagaaaaagactcccaaagccaggcatggtggctcacacctgtagtcctagcactttgggaggccaaggcaggaggatcacttgaggccaggagttcgagaccagcctgggcaacatggtaagaccccatctctgctattttaaaaaataaaaaatcaataagaggctcccaagacttgcggcctgaacacctggtaggacagagctactgaggggctcagtctgaggtagattaattttgcagtgtctaggaggcaattagaggcaggtggctgaaggtcggggagaggtgactgagggcttcaggcaggactgagatggggggtgcccagggacctcagaaaccagggtacagcccagccacagataaccactccctacccctcgctccacagggtgcgctggctctggccctgcctgtgggttccggtgtggtgcagtcgctggcctaccacccaacagagccctgcctgctgaccgccatgggaggcagcgtccagtgctggcgagaggaggcctatgaggcagaggatggagcaggctgaagccaggggacccaccaacaggaccaaggaccgagacacagacatggaaggacttcagataccatcttattctagagacgtagctgaccaaaaagtaggggaggggctgggtctgcaaattaataaatagaagagggggtaagaccttcctgggaccgcagccgctcagtcctcgttcttctcatgcatgaaggcatccatcttctgggcaaaggtttcagccacaagcagggggaagaccagggaggcgtcagcatagacctgggtaggggggaacctgggtaagccatgggacccacactcatcgtcccagagaccctatgccccacccagccagcgcttaccttgacgggctgtgcatccacccggatcttgccccaggagacagcctcgtctggtcgggcacctgagtcagagccatcaaactcctgggctgtgttgatgtaaacagcgtagtcggccccgttccgctgtggggaggcgggggcacggtgggcccagtcagccagtcacaggagacagacacagagggaggacaccgtagccaaacaggctgagaggtgtgtcccagatgaaggaagcccttcacagacattcgctcccagacagggcccatgtcaatgtctggggtcactagagctgctgggcaacgatggctgtgtttccccagacccaacagccaggtgtcaacaaccctgccccatctgcaaggcaggagctgccagcaactctatcttcagaagccctccaaatccaaccaccgcctgcctcctgatccctgcatggtcaccactgtcctggactggagttctcactcacctgccaccatctgttcaccacatggccaccagggggagcatgggaacccgagtcaagtcctctcccacttctctcagtgcaaaagccaaagccccgcctcagcccacagggcccagcaggctccctgtggcacctccctgcatcacctcctggccctcaccactccaccttcccctcaccaggtacccagctgttcctggattacttcaggcgccccagagcctttgcaatggctgttccctctcctgggaactttgcaatccagaagctcaatgctagtacagcagcacaaactcctggcacgggagacaaccacatagctcctgggagatgcctccccaaacccctgctcccagctcacacttccagaagcctccttccaaaacctcttgttggacagcacccctttctcttctcatgccatcatttagtattccccgtagcaatgactgccccctgacgtggatgtcacttgtttgctatctcccctactagaacatcagtcccggggagcagggatcctggcctgtctagttcatgctgtctacccagcacatggcataggcccaccacacagcatgtctgcagagtgggccgaagcgccacccccactcaccatgaggttggcattggcaatgtggtgcttgaccacgcccccgcccagaatgatcatcccagtgcacttggcaaagatggcctgtgtgttgatgagcctcaggtctgggggaagagcgccgaagtcaggccttggactcagccagccctccttcccctctcctctgtggccctagcgcctcaccctcaacgatgtccaggaccaggcccgggttcttgtaggaatggaagaagatcatgtcgcccagcgagccgtctgtaagtgcgggactaaacacagggatgtggttctgcagagaacatgacaggacagtggctggagctcagagcctcgtctccatgctggctatatgactatctgactgtggatggggtgcctaatttctctaggactgtttcctcaattataagcataacagaaacacctctcacagatgaggcctatatgagaaaacccacagaaaacacttagtatagtgcctggcacataaagaaccagcctattcttagcttgctgagctgtttctctctctttttttttattccctgagacggagtttcactcgttgcccaggctggagtgcaatggcactatctcagctcactgcaacctctgcctcctgggttccagtgattctcctgcttcagcctcccgagtagctaggattacaggcgcatgccactatgcccagctaattttgcattttgtttttttagtagagacagggttccaccatgttggccaggctggtcttgaactcctgacttcaggtgatccacccgcctcagcccccaaagtactgggattacaagcatgagccaccgtgcccggccgtctaattcttttttaaagagccagcttgtggccgggcgcggtggctcacgcttgtaatcccagcactttgggaggccgaggcgggtggatcacctgaggtcaggagctcgacaccagcctgaccaacatggagaaaccctgcctctactaaaaatacaaaattagccaggggtggtggcacatgcctataatcccagctacttgggaacttgatgctgaggcaggagaattgcttgaacccaggaggtagaggttgctgtgagccaagattgcgccattggactctggcctgggtaacaagagcaaaactccgtctcaaaaaaaaaaaaagagccagcttgtgcaacatggtgagttcccatctctacaaaaacaattagccaggcatggtggcacgcacctgtagtcccagctactcagcaggctgaggcaggagaatcgactgagcccagaagctcaagacagcagtgagccattattgtgccattgcactccagcctgggaaacagaatgagaccctgtctcgtaaaaaagaaagagtaagtaggctgggtgtggtggctcacccctgtaatcccagcactttgggaggccaaggcgggtggatcacttgaggtcaggagttcaagaccagcctggccaacatggtgaaaccccatctgtagaaaaatacaaaaattggccgggcatgatggtgggtgcctatagtcccagctactcaggagggtgaggcgggagaatcacttgaacctgggaggtggagggtgcagtgagctgaaatcacaccattacactccagcctgggcgacagagcaagactctgtctcaaaaaaaaaaaaaaaaaaaaaaagactatgtagctttttttttttttttttcaggttctgattctctaattaaagggagtgggtagctcttattttatagcatctgggagtgtgggaccctgagccaggccccaggagagttgctaagtgttgcctctactgttccagagatagtctgggaggagcataaggatgctgaggccccactagttatctgtgtgacttcagacaaaattacctagcctggctgggcacagtggctcacgcctgtaatcccagcactttgggaggccaaggtgggaggactgcctgacgccaggagttcaagaccagcctgggaaacacagggagacccccatctctacaaaaaatttttaaaattagctgggcatgatggcatgtgcctgtggtcccagctactcgagaggctgaggtgggaggactgcttggccccaggaggttgaggctgcaatgagctgtgatcacaccactgcactccagcctaggtgacagagcaagatcctgtctcaaaaaaaaaaaaaattaccacgcctatctgtgtttgagtctcctcatctaagagtgaggatgctgagaataacagtactgaatccccaggaggctggaaagatgaaataagttaacacatgccaaagtctggctactttgctcccgcttaggtcctcaccttctgggcccagtaatacacggactctgggttgttgatctccttgcccagccgggcgatcatcttagaaggcgtccactttacaccctaggagaggatgtgaccttcaggccatgcctcccctgactcccactgaactggcccctccaggttgccccagccccacctctgtgttctgctccatcaccatctggtccagaatgggcatcagccagtcctcaaacttgcagtaattctcattgggcaccagcaggtttccgatcctgagaacaggaggcatgtaggcatcaggccccaggacccttggtccagctcccctgcccaacaccactcagggttctcacctattgatcccgttctcccggagctccttccccctgaggctaaactcgcccaagtatgtgggcgccaggcacttgatgaggtcttcctccacgccgccagctgtggtcaccaatacgtccacctgcagccacaaggcagtgaatttggcccaagaaggaagcccctgccctcattctgggcagaacttctaacctcatccttgtccagtgactcttatgagggagctctgctacaaaacaaaacttgattctattcctctgcttataacagacccctatctgcccatctcacttaaacgatcaataactgcattgcccattgacccagaggccaaggccacggcctcaccaggtccccaccatgttgtgctgcacaaggtagcgaatggtctcacggatgcctgaactgatgaggttggatgtatatcccaggaaaatggtgcagctggtaagtgggcggcggctctgggtcaggtccgcgtgctggtcttcatcctgtgacagtggttccagcttcttctcgatctgtgagtaagggccaagtcaagttaagcactggccttaaatcccagactcaggactccaggtgggctccagaaacagatttcaccccaggccctgcacattcagggatacaggaccagttctacaggggaccaaggaacatctcctgtgtaaactctgccccttcccagaccagatctcaagacacacgttcaggatttgcccccacccttttttttttttttttggacggagtttcactcttgttacccaggctagagtgcaatggcgcgatctcggctcactgcaagctccacctcccgggttcaagcgattctcctgcctcagcctcccgagtagctgggactacaggcgcgcaccaccatgcccggctaattttttgcattttagtagagacggggtttctccatgttggtcaggctggtctcgaactcccgacctcaggtgatccgcccgcctcggcctcccaaaatgctgagattacaggcatgagccaccgtgcccggcctttttttttttttttttttgagacagagtatcgctctgtcaccaggctggagtgcagtggcgcaatctcagctcactgcaacctccacctcgcgggttcaagcgattctcctgcctcagcctcccgagtagctgggactacaggcgcgcaacaccatgcccggctaattttttgcattttagtagagacagggtttcaccatgttggccaggcttgtctcgaactcctcttctcttgatccacccgcctcggcttcccaaaatgctgggattataggcatgcgccaccgcgcccagccagcccccacccttttaggaatcagagagcatctcctttcagatccggtcccttccccgctgggaaaagcaaatctaaattcaagaaccgcccagacttaggctcctcctcccatatcctcccttaatttgtcttgccccaggctccgcccattccagaaagctttaaatgtacctagaacccgcccccacaccaagaatcagtcctcgcctcctcaggttaccgtaccagcatgtaactaccagagtgcaaaatccccttcccaggacagaaactcccgcccagaataggtcccgccttcctccaactattgggcaactcaaataaaagacatatcccctccactggaaacgctgcccccgtctagtaccgcgttggttctacaagccacgcccctccgcgtccctagaaattccgcccggtcctcaccatggcattgacttgctgtacagcgcgcccgaagttggttgcttggaagccggtggtgccgaaggcctccagcagtgcgcggtaattcacaccgcggttgaagtcgtagccccggacctgggtgctttcgggcggcaacgtcgagctgtgctttagcacggcggccagcgcccccgctggcgcctcccgttccagggaaccttccatgcgcctatagccggctctcgagtcaaagctgcccctaggccgggcttacggcggcccagaaacgcgttaaaccccgacgcgcgcgtctccgcaagagcacaggaagtagggaacgtgctttgggcgaaagaccggaagttggtttatcacgtgaccatttttagcccctgtaaaccaggtcgccgccatttttgtgcgtgtgttccgtaatacggaagccgcgaggagcctttaggccctttctttctttttttttttttttttttttttgagacggagtctcgctctgtcacccaggctggagtgcagtggcgcgatctcagctcactgccagctccgctttccgggttcacgctgttctcctgcctcagcctcccgagtagctgggactacaggcgcccaccaccacgcccggctaatttttttgtatttttagtagagacggggtttcacctggtctcgatctcctgacctcgtgattcgcccgcctcggcctcccaaagtgctgggattacaggcgtgacccaccgcgcccggcgcctttaggccttttcttcctttttttttcttttttttttttttgatacagggtttcgctcttgttgcccaggctggagtgcaattgcccgatctcagctcaccacaacctccacattccgggttcaagcgattctcctgcctcagcctcccgagtagctgggactactggcatgcaccgccatgcccggctaattttgtatttttagtagaggcggggtttctccctgttggtcaggctggtctcgaacttccgacctcaggttatccgcccgcctcagcctcccaaagtgctgggattacaggcgtgagccactgcgcttcggcctttacttgttttcatgtgttctcgacttcccatgaatgaagattcttttttatttttattatttatttatttaatttatttttgagacaagagttacacgctcttgttacgcaggctggagtgcggtggtgcaatcttgactcattgcaacctctgcccccctggttcaagcgattctcctgcctcagcctcccgagttgctgggattacagacacccaccaccaggcctggctaattttttatttttagtagagatggcatttcaccatgttggcgaggctggttctgccctcaggtgaccgcccgcctgggctttccaaagtgctgagattacaggtgtgagccaccgtccccagccaaaattcctattttaatgccacctgctggagacccactgcttggcccggcactcgcccattcgtttctgttctgtcccctcgggaggggaggatggttttgttgttgttgttgctgttttgtttgtttgtttgtttgagctagagtcttgcgctgtctcccaggctggagtgcagtggcacgatctcggctcactgcaacctccgcctcccaggttcacgccattcttctgcctcagcctccccagtaactgggactacaggcgccggccaccacgcccggctaatattttgtatttttagtagagacggggtttcaccgtgttagccagggtagtctcgatctcctgacctcgtgatccgcccgcctcagcctcccaaagtgctgggattacaggcatgagccaccgcgcctggcctgctgctattttttgatagggtctcactctgtcgccaggctggagtgctgtgacgcgatctcggcccactgcaacctctgactcccggactcaggtcatcctcccaccccagcattccgactagtgtgcaccatcgtgcccagctaatttttttatgagggtcacttttttttttttttttttttttgagacagagtctcgctctgtcgcccaggctggagtgcagtggcgcaatctcggctcactgcaagctctgcctcccaggttcatgccattctcctgcctcagcctcccgagtaactgggactacaggtgcccgccaccacacccggctaattttttctgtttttagtagagatggggtttcaccgtgttagccaggatggtctcgatctcctgaactcgtgacccgcccgccttggcctcccaaagtgccaggattacaggcgtgagccactgcgcccggccgagggtcacttcttaagcgtcacccatggacaagatttcggtcaccaggcagagttagacacagtttcatccttcctcagccacttttgtctaatgggatagtgagcccggttcgtgccctcacaagtctccaaagccttcacatgctgcataacgctctgttcttccttcccttatagctgcagctgtcacctccacctcctctgggaagccttccctgaactcccactgggtcagtggcctcttctgggacccagggctgacgtctctttccctcctgcaagaatgtgagaccctgggtgtcatctgtatctcaaacacaccctcctaacagtgcatacggccaacaggattattcactcactctacaattcatgtagtctattctctatggtgggctccgtgctaggcactaaggatttagtggtgaacaagaccaagatgtggaccctgccctactggagcccacaatctgattgggaagatagaaagttaacaatagtggtgagtgctatcaggccttttttgttttttgttttttttggagacagagtttcgctcttgttgcccaggctggagtgcaatggcgcgatctccactcatcgcaacctctgcctcccagtttcaagcaattctcctgcctcagcctcccgagtagctgggattacaggcatgagccatcacgcccggctaattcttgtatttttagtagagatggggtttcactatgttggtcaggctagtctcgaactcctgacctcaggtgatctgcctgcctcggcctcccaaagtgctgggattacaggtgtgagccaccgcgcccagcgcaatcaggatttaaacaggataatttgagtctttaggtggaggagttcgggattttagttggagggatgggtgaaggacgccaaggaggtgagatttgagccaaagccagaaggctgagaaaatccccgtatgtgaagatgcagagaggccatttcctgcacatgggaagacagaacagcaaaagccgtgaggctggaatgagcctaccttgttggaggagacagacatcctccttgacatcctcgcttggacctcaaagttgccccctcagctccctctccacctatccctgatctttctgcatctcagcaaacggccccaccctccactcatccactagactgaaaaatagggattggggctgggcgcggtggctcacacctgtaatcccagcactttgggatgccaaggagggcagatcacctgaggttaggagttagagaccagcctggacaacatggcgaaaccccgtctctactaaaaaatacaaaaattagccgggtgtggtggcgcacacccataatcccagctactcaggaggctgaggcaggagaatcacttgaacccgggaggtggaggttgcagtgagctgagatggtgccactgcactccagcctgggcaacagagcgaaactccgtctcaaaaatagataaataaaaattaaaaatgaggagcgcagcttgctgtctccccttttctcacaccccacatccatccttctcagcatgtctgccaacctctacctataaagtaggtccgaaatccaggtgttttctttatccccatagcctgcaagctggctttggtatcctccaacccatctcccacctaacagctaaaatcagagagcttttttttttttttttttttttttgagacggagtcttgctctgtcgcccaggctggagtgtagtggtgtgatttcggctcactacaagctccacctcccgggttcacgccagtctcctgcctcagcctcccaagtagctgggactacaggcgcccgccacacgcccagctaattttttgtatttttagtagagacggggtttcaccatgttagccaggatggtcttgatctcctgacctcgtgatccgcccacctcagcctcccaaagtgctgggattacaggcatgagccaccgtgcccagccgctgagcttttttttttgatgcagggtctcactctgtcaccagggctggagtgcagtgggacaatcacacctcactgcagcttcgacctcctggcctcaagtgatcctcccacttcagcctccccagtagctgggactacaggtgcatgccacagctctttaaccataaatcaaacatgtcactgttaaaacctcctaatggtagcttccccctgggagtaaaatccaagcttttcacagtggccttaaagggcacctctcaacctccctgctgccatctcccaccatgctggccctccctccctctctcctctccagctacacagacctctttgctattcctggaacccaccaagctcttttttgtccaaggagtcaggtacttgccgctccttctgcctagaacaccccatttctcagttccttctcctcctttgggcctaagttcaaatgtcacctcctctgagaggcctgccctgaccactcctctcccctttactttgattttattcttctttcatatgccctttcacatgtatactctttcactgagtacattttctgttgtccatccctgcctaactagaaaggcagctccatgagggcaaggttttgtcttgtttcattgctaatttgggtttttgcacagtgctgggcacatattagaatctcggggcagggctcagtggcttatgcctataattcctttggaaggccaaggcaagaggatcgtttgaggccaggagttcaagaccagcctgggcaacatagtaagaaccatctctacaaaaagttaaaaacataaattagcagggcacggtggctcacgcctataattctagctaatcaggaggctgagttgagaggatcacttgagcccaggagtttgaagttacagtgagctatgattgtaccactgcactccagcctggacgacagagcgagaacctgggcttaaaaaaagaaaagaaggccaggcacgatggctcacacctgtaatcccagcactttgggaggccgaagcaggtggatcacttgaggtcaggagttcgagaccagcctggccaacatggtgaaaccccttctctactaaaaatacaaaaattagccaggtgtggccgggcgcagtggctcatgcctgtaatcccagcactttgggaggctgaggcaagtggatcacctgagatcaggagttcaagaccagcctgaccaacatggtgaaacctcatctctactaaaaatacaaaaaattagccgagcatggtggcacatgcctgtaatcccagctactcgagaggctgaggcagaagaatcgcttgaacccagaaggcggaggttgcagtgagccgaaatcacgctattgcactctagcctgggcaacaagagcgaaataccatctcaaaaaaaaaaaaaaaaaaaaaattagccgggtgtggtagcatacgcctgtaatcccagctactcaggaggctgaggcaggagaatcacttgagcccgggaggtggaggttgaaagtgagctgagatcgcaccactgcactccaacatgggtgatagagcaagactctctctcaaaaaaaaaaaaaaaaaaaaaaaaaagaacgaaggcattggagatttgagcctgagcagtggcgacaacaggaggagaggcaaggctgcatgttggagatggcagaggctgacaaagcagatgtgttgggaacagttagcaggagatccagcaggccagggggaggccagggcctcctcactcccccagccaaggcacctagcccacagggacccaggtgacacatgacaccagaggagccacagggcctcctggggcagggaccccctcagccgaggcagcagctgctgctgcagctggtgacatttcactccatgagagccctggcttcaaagtctttgcaggggtagccgagggagaaaagggggttgaagaggacaggctgggttggggagggagccacagcagggtggccaccagaggaccaggcagccagaggtgacttgggccggagcccttagccgaggtgtgtgggcctgatgggtccaggagcagccaccctcatcctgcagcccccaaggaacatagaaggaggtgtgggaaccctcgggcagccctaggctccccctaggggactgaggttgggcctgctgcccacggcctgcccactttacccagatgtccagcaaggtggccatcaacagtgacattgggcaggccctctgggcagtggagcagctccagatggaggcaggcatcgaccaagtgaaggtgagggtcggggccagtgcaggaggcgggaagaggtgggaacacatgggccaggggacaggtgcatgcctgggtctggtctggctgaaccagttggtctgcaggtgtccaaagatggccgccgatctgctgaagttctgcacggagcaggccaagaatgaccccttccttgtgggcatcccggccgccaccaactccttcaaggagaagaagccctatgccatcctatgaacccagggcaatgccaccctgtggcctgggcaaaccagggggcctcaataaacatgaagtgaatacttctcagggcatggctgagctgggctgagatgggagaccagagggactttgggcttgcaggggccaggtgcgtacctggcccagcctccctccctgcctgcccccggggtcacagccacagcagcacacacacaccctggagccccagacggagagcacgccatccctcttgccctcgccagcacccatgggatagcctgagcaggtaccctttcccaccgtgcagacaaatggccaggatttgagtcataatctatacaccacacgcgtcacacatcacacacacacgtgacatcatagacacagatgcccacgatcctcaggactctccctcttcaaatgcacagcaacagctgacatgcacccccagcccagacttgctatctctcccagtcactcccatgcaggcccgcagccccacagccccaagcaggcacaggcagaaccccagcaggcaaaccacactcacactccaggcccaagcaccaacatgtcaggtttatttctccttcgctctcaactgagagcggggcatccaaatcataacaaaaccagggcccaagagtgggaagcggccccctgggtgggcctgaaccccaatttcacccttcccccgggcatagggcccaggccaggacgctcacccgaatgtggctgggactccttgtgccctaggcccacggggcggaggcagcaccaacattggggatggtcccccaagaacagaggaggaagcccagcctccggcaggcagtatccacatccacgcccacctgctcaggcctgcagcctccagacctctagcgacaggtctccagagccggccaccaccaggttgccctcagcacagacctgggaagggggaggaacatgaggagtcagggacgatggcgctctggccagctgggcagggcacatggggcaggaccttaccctattgagcccattgtcatgccttcgggtgcaaatggtccttggtgggtctgtgggcacgtgcacctagtgaggggcaatgggcgaggtcaagaggtgtgcccctggctgatggaggtaggggagaggcagggactgtcctggggtgggggctgggcaggagcctcacccggatggtcttgtcagtggatgtggtgtacaaggctcccacggagtactggatcccagtgatgggaaagctgtggcccacatcaaaggactgcaggaggaggatcaggcaacactcagtcgaggctctcccaaggcccgccctcccccacaccaccaggggctcgggtaggaaggaagcccggggggagggacagtcaggggcaggagctccagcagacccggataagctggaagcagccgttgcggttggcgaagacgtgcagcaggccctggttgtcaccagcccagagctggggttcctggtaggacatgcagagcaggtaggagtccagctacgagagggacaagggacgggacagctcaggccgggctgggcctgcaacagtccccatccctccaggcccctggggagggcccacctgcagacgctgcaggacgctgttggctcggcggtccaccaccaccagggtgtggtcctcgctgcctgagatgatgtgccggtcatccgccagcagggtcagcacgggtctggagtgtagttgctggtgcttcaacagggctgggccggcttcatgggtgatgggccggtgaggagggatatcagagcccctcgaaggccccccccagcccatgagagcatcccgggtctccatcctgtctggcaaaaccctcgatctgctcattcccccaccccacagagtgacccatctctcctctcccgcctcaggtaaatccaggcttccacaggagccccaggcctctgcccatccccgtccacatcccatatccctcctccgatcccatctactgttcttagcacagagctgaccaaggtggtctcagtcttgcatccaccctcaggttggcctgaaacatgcctatcccgcagccccgctccagctctgcctggacaaggtacactggcccttcaattaacaaaagtagaatgaataaataggccaggcacagtggctcacacctgtaatctcagaattttgggaggctgatatgggcagatcatccgagcccaggagttcaagatcaccttgggcaacgtggcaagaccccgttctccatttaaaaaaaagaaaaatggccgggcgcggtggctcacatctgtaatccctgcactttgggaagctgaggtgggtggatcacctgaggtcaggagttcatgaccagcctggccaacatggtgaaaccttgtctctactgcctcagcctctggagtagctgggactacaggtaggcgccaccacatccagcataaaaaaacgtagttaatccaccactgttcctattatcatcttcccccattaaccccatggggctgctgtggtattattatctggatttcaaagatggggaaaccgaggttcaagcttgtctggaggtcacacagctaggcagtgggacagccagaactctaacccgcccccagggctgcccaagcttcaccttcacccgctgcccaagttgcctgtattgtaccagcacagcatggccactctgagtggtgagtatttggttaagtgactatgaccccagccaggctgtgaagccccagtgtctccttccctaacatgacatctcccaacctgggccccaggacccttggcccacctctggggtcgtagatggtcaccttcttgtcataggtgccagtcaccaggatgtcaggcaggtaggagaggcacagcacggctgagctggccctagggacacacagaccacagggctttggctgtggccagacagggtcctatccccgcaggccccctgcccaggcccccacacactttatctcgccgaactgctgcccatccgctgccatgtcccagagcttcactgtgctgtcccaggagccggagcacacgcggtggtcctgcgctgccagtgaccacacccagccctgcaggacaggagcagcagtcacacacctgccacagcccatgggggtcccagactgggatcgttctgtttttgcaggtaaggctcagagaggtcaagagactcacccaaagccacatagctcttcctccccagtgcccatggtgatagatgctgcagcaagtacaacacccaactctggctccaggtgatcacccccattgcatagatgaaaccagagcaagttcaagttgagtacagattaaagtttgtgtccatgggtcagcctgacttcagagtccaggaaaggcacaccccacccagaaactttttttttttggagacggagtttcacttttgtcatccaggctggagtgcagtggcttgatcttggctcactgcaacctctgcctcccgtgttcaagtgattctcctgcctcagcctctctagtagctgggattacacgcttgtgccaccacgcccggctaatttttgtattattagtagagacggggtttcaccatgttggccacgctggtctcaaactcctgaccttaggtgatccgcccgcttcagcctcccaaagtgctgggattacaggcatgtgccactgtgcctggcccaggaactctttttttttttttgagacaaggtcttgctgtgtcatccaggcatgaatgcagtggtgcgatcatggcttattgcagcctccacatcccaggctcaagcaatccttgtaccacagcttcccaaagagctgggactacaggtgcatgccactacactctgctaattttttttttttttttttgagatggagttttgctcctgttgcccaggctggagtgcaatgatacgatctcggctcaccacaacctccgcctcccgagttcaagcaattctcctgcctcagcctccctagtagctgggattacaggcatgtgccaccgcgccagctaattttgtatttttagtagagccggggtttctccatgttggtcaggctggtctcgaactcctgacctcagatgatccgcctgccttagcctcccaaagtgctgggattacaggcgtgagccactgcatccggtcttttttttttttttgagacatagtatcgctctgtcgcccaggctggagtgcagtggcatgatctcggctcactgcaagctccgcctcccgggttcatgccattctcctgcctcggcctcccgagtcgctgggactacaggtgcccacgcaccacgcctggctaattatttggtattttttgtagagtcagggtctcccatgttgcccaggctggtctcgaactcctgggttcaagcaatcctcctgcctcggcctcccaaagtgttaggattacaggcctgagcaactaactgcaccctggcccaataacatttctaagtcaagttctgcaagaactcagcaccagtggtggtttgaagccacatgacaagtgattaagagtgtggcctctactttgtgacctggcaaaccatatcacctccctcagttcattcatcagcaaattgggcagaaaacatcccttgcctcaggagctaatatgcacagggtgctgaatgctgactttttgcccaccaatcccgctgaggagggcaatattgtgtatctcattttacaaatggggaaactgggccccagagaggttgagtttctcactcaaggtcacacagccaggaagcagcacagtgagaatttgaacccagcatcctggccccaagcccaagctctcagctaccggcctgaccaccttagcgactggtggagatgctcctccacagccacctctcacgagatgacagtcatgctcagagttggctgatctccaagggtagtctcataactgctttacactgggcctctcaaggtgtacctgacgtctattgagcacctactgtgtgtcaaagcctgagcttggctgggcaccgtggctcatgcctgtaatcctagcattttggaaggctgagtcaggcagatcacttgaggccaggagtttgagaccagcctggccaacatggcgaaacctcgtctctactaaaggaaaaaaaaaaaaaaaaaaaaaaaaaaaaatatatatatatatatatatatatatatatatacacacacacacacacacacacacacacacacacacacacacacacaaaagaaattagctgggcatggtggcacatgcctataattccagctactcaggaggcaaggttgcagtgagctgagattgtgccactgcactatagcctgagcaacagagtgagattccattaaaaaaaaaaaattagctgggcatggtggcaggcacctgtaatcccagttacttgggaggctgagacaggagaatcacttgaatcccggaggcagaggttgcagtgggccgagatcatgccattgcattccagcctgggtgacagagggagactctgtctcaataaaaatataaataaataaaggccaggtgactcatgcctgtaatcccagcactttgggaggctgaggcgggcagaccacgaggtctggagatcgagaccatcctgaccaacatggtgaaaccctgtctctaccaaaaataaaaaaattagctgggcatggtggtcctagctactcaggaggctgaggcaggagaattgcttaaacctgggaggcagaggttgcagtgagccgagattgcatcactacactccagcctagcaacagagtgagactccatctcaaaaaaaaaaaaaaaaaattagacaggtgtggtggcatgcacctgtagtcccagctactcaggaggctgaggcaggagaaccgcttgaacccgggaagcagaggttgcagtgagctgagatcatgccacactccagcctgggtgacagaacgagactccgtctcaaaaaaaaaaaaaaaaaaagcctgagcttaatgcatgtccacattaatgcataatgcatctccttcatcctcatcctaatcacccactggacagaagtagaaactgaggcacagagaagtcacacatctcactcaaagtcacaccaaggttagaaaagtcagattcaaatctatgcggtcctgtaccaaaacctggggccttaaccaagatgccctactcaggcctcatacctcctatccccacctgactcctcacctcatgggtactatttcgcttagtgcctaaggtcttgatcagaacctggttggactccgtccccagctgccgcaggtcccacaagttgacgttgcgatctcgggagcccgacagacagagtgacccaccctggaaagggagcaaggtgatgttgtcagggccaccctggcccaccctgcctggccccccacagaccccgtctcacctggagcagcagcactgagtcaacggaagccacgtggccttcggccaggcagaagtattcgacccagcgcccatcctctgcccagcgggacaggtgctgctccagcgcaatgcaggctgccggccagtcaaagttcttctctgtgggttaccacgagtagggtgcccagtgggcagggaccctagcacccatgccagctggccaagcccaaccctggcttccagggagcccacactacaccagacttggacagaaccccatggagatccctactcccaccccaagccgacccaggctgtggtcttgggaccacctgcctgcccatttcccaggcaggtctaggactactcactccaatttccagaaattgggaactggggtctcagaactacctctccaggcgccatcccccaacccaaactcagggcagagcagtctcaggatgttgaggtctgacctcaggctcagcatagaagctgggacctcatgactaacccttcctgcctcagccatctgaaccagaccaagggggctgtttctcaaacagtatctggaaaccagggagccttgtcaagatgcagaatgcaagccccagatgcagattctgtgatatggacggggtccaagcatctatgtttattaagctgtttgggagagtctgacctgggggttggatggcaacaccttgagaatcactgatcccggagtgatcctgattcctctctaagcagaatcaaagcttccaggttaagggtatcaaacacccaagctgtaatacatcttggcttaagggcctgaggatccagctgtatcaggatcaacaatatcgattcaaaggtcccaagctgtcttccctcaggaaccaatcaactcagggccaagagccactgtctcacccctaactgggtcaaggctctagggctcaggagttttgacatcaacaggtgctgtctcagcttctaagctggactcagaacctgaggatccttgggctcactttgagccccagcataaactccagagcctaagacttcaagtccctgtgtcaatccccaatcaggggtcagtggcttagtaccacaagaccccaagactgaggatatttggatcctgagtcgtccaggaaccacagccccatgttagggtttcacagcctcaggaccccaagtgcctgactgcctcgtggtccacccagaggtcctcaggggcttcggcaccaccagtaactaccttagcctccagcctgagccaggacagccacgaagcctgcaccagaggctgcatccggaacaccccatgtacctcttccccgccccaagcctgacctgggcgggcgcccccggcccccggtccccggcccccggccccgcgcaccttccaccactgggtagggcgcgcgtacgcggcgtagcgcgcgtagcctccaggtgacatggtcagacacgaggtcgcggagcgcgtggcacacccgcgacaggacgtggagcacgaggcgggcgtccaggtaggagcagatctcgagcagcagctccgggggaaggctcagaaggcccggctcacttacggccgaaaccctggacgcggcccgaggctccgaagcgctcggggacgcggcgggtgtggatagctgcgaggggcgcgagaacgccagcccggattttggcggactgagaacgcgggccacgtaggccttggcctgcgcgtctgggtctgtctctgactctgggtccgagtcatcgtcccaggtgcgggaatcatcgcaccgccctaggggaagctccattgcgaccgggtgggcgctgccggcctcgcgtcttgtctcctaggcagcacgagggcacttccggcgctgtctgatgacgtttatgcgcccaccggaagcgacgaagtcagacactggcttaatacagaacatcgccccgcttacagggtctcttgcaactgcgtcggccttaggctggaaaatgcaggttcctgtttctgcgctttttaaactagccgataccgagagccagccaactctagctaaaaacgaaactcaagccaggcggggtggcgcgcgcctgtagttccagatactcaggaaggtgaaggggtaggatcccttgagtccaggagttcgagactgcagtgagccatggttgtgccactgtactccaacctgcgcaacatagtgagaccctgtctctttaaattagacataaaataaacactgctttaacgaaggcatctgttatatgtgacactgagcttagaaacccaaaggcccctttccgagttcaaggagtagagattggaactcttgcctcttttcccagagccagaaatatgcagttacactgcagaggcatcagttaagtgactttttttttttttttttttttttttgagaaaggaactggggcctcagaactacctctccagaccccattccccaacccaaccttggaggacagcagttcagtcctccaagcggagtgcttggctcattgcaacctccgctttctggactcaagtgatcctccacctcggccccccaggtagctgggactacaggcgcgcaccaccacacccggctaatttttgtattcttttgtaaagacagggtttcactacgttgtccaggctggtctggaactcctgagctcaagccatccgcccccaacttggtctcccaaagtaccaggattacaggcgtgaaccatcgcgcctggtggaaagctacctttttcttttttctgagacggagtctcactctgtcacccaggctggtgtgcagtggcgcgatctcggctggctgcaacctccgcctcccgggttcaagcgattctcctgcctcagcctctagagtagctgggaatacaggcacgcgccaccactcctggctaatttttgtatttttcagtagagacggggtcgcactatgttggccaggctggtctcaaactcctgacctcgtgatccgcccgcctcagcctcccgaagtgatgggatgacaggcgtgagccactgcgcccggcctaacatcacacttactaaaacagcatgttggccgggtgcggtggctcaggcctgtaatcccaccacttcgagaggcaaggtgggttaatcacttgaggtcaggagttcaagaccagcctggccaacaaggtgaaaccccttcctactaaaaatacaaagaattggccgggtgtggtggcaggcacctgtaatctcagctgctcagaggctgaggcaggagaatcacttgagcctgggaggcggaggttgcagtgagccgagatggcatcattgcactccagcttgggcaacaagagcaaaactccgtctcaaacaaaaaaactgcaggtatttactgcaagcctcttttgagccaggcagctaaccaatccacgtaggtcatctgcgcagtccttgctgtttgctctacttgacactcttctctccatggctctgttcaaacatcgtcttctcagtgtggcctttgcaggtcaccctacataagatttcaaccgtttcccccaccattctctctgccttcctgtttttctctataggacttagcacagttccactttttatactctatcctctcactagaatgcaggacttatttgttgaatattggatgtgtgtcagtatttttaaattttcccacgttggtctttgggccacaccaaggttgcagtaagattttattttggctgggggcggtggcccacacctgtaatcccagcactttgggaggctaaagtaggtggattgcttgagcccaggagttcaagaccagcctcagcaacatagcgaaaaccccctctacaaaaaatacaaaaattagccagcatggtggcatgcacctgtagtcccagctacttgggtggctgaggtgggaggactggttgagccagggaggttgaggttgcactgagccatgattgcgccactgcactccagcctgggtgacggagcaagacccggtctcaaaaaaaagaaagattttattctgaagattgtggtttccccccacagctgaaactacttctcatttgcctgagtaattgtaactaatattaattaaattaccctcggcctggggctgggctgaaccttctatgaaaaccttgacccagggtcagctgatgataagagtgcggcaaggcctcaccccttaccactcagtttagagtacggcagaggggcatcttgaacctgggctgtgacactaatggctcacccttagtgagctgaagtcccagagaatgagctgcacatttcatatatgttacaaatttaatcttccatctttcacattcgtctatcttcccactctcaagtatccccggtgcccccgacatttcttcactaccaaagccaaggacacaggaagccacagactaaggagttcacaagaaactgatctttactcaacaaagttctacacaagtggaatctcacgccacctcggcgccaatccccagcacagcacagtaacaaatggacagacccgggagcccgcagggggaagagggtgaggagggaaagagggactgtggctcaaggccagtctgggtccacagccctgggtaggggagaaggttgagaagctgaaacttcattgtgcaaaaaacaaccaaaaataaattaaaaaattaaatagtttttttttaaaaaaaaaaaaaaaaaggaaaacgagaagaaccaggctccccttccctgaaggtgtttgtatccccccatcttgagtagcgaggggttaccaatcccatcagacagccaatccatccacacaccccaagacccagcagaggatgcttcaaagaactggaattaccagaaaattaaaaggtatttttaaaacttttttttttttttttaacaaatggcttccagagacctgctcgagtttcatggggtgggcgtgcagggacacccagctaatttatggaatgtgtactgagtgccccttggaatagatgcagggcctgaccctgactatggaaagacacagggcttggatggagggtctggcgcccaggagggatggatggagcaggccccaggatgcgagactccagtcagactccaaaacacaaggggctccccaaagaagtagaaagcagggaaggaaaaaaagggaaaaaatgctaagggggtctgcaaggcccagttttctggccaactgggaagtaactacacccccaccctctctaggggagccccttccaccttgaccatgttcccagactattccggaaggttctctagaattgctgacccagtctagtaggatctctgggctcactgggtactatgatgagcaggaagtcccagggagatggaatagggaacaggggacacaccacctttcccttccaccaagccttggttttcctttttgctggcaaaaacctgtgtcctctgtcatcatcaattaaacgcccctgccccaggccttgagttaaaactggggcctgaaacgtgagaagggggtttcagaagcacagagaaacggactgcccctgaagctgcttacagagagagatgctcggggtaggtgccagtagctctggctacacccagctctcttcaggaaaaaggtcccaacccagtgtcttcaaaagccactggagcacacaggaaggagaaacggtgacctctggccagccccagccactccagtggttctcaccctgcgagctaggctaggataaggacggagacaccaccagctgaggctgcaacaaagctggcagggagtgtgtggagtgggtcccaagcatgtgcgtgctgacagggcgactcccaaggtcaccatcctcctccccccgccccgagatcccgcctgaggccccccacccacccagccctccccagtcaccgccaattccggcaaaacagcagaagcttcttaaactctagatgcaggttacacggaaggccttacgggttaactcaggggttcactaattctactgtctccatgcagtcggggaaatggtggagcggctggcccagcctcgccggttatggcacccgcacatgcgtgtggccatgtgtgtccgtgtgagtgtacgcgtccctacgagggcccccctcctgacctgctcctccctcacctcatccgaagccggattcggtcagctgtgtaattcctccctcccacgtagctggcccaagtgggctgccagagatgaccctattagagcccaggggcccttgcccaccagaagtcccccccacctccccgtttgtaggatgagcatggtggccccacccacctgccaggagggcaagtggacggatggacggacggacggacggacggggaaggcatctggatttgagtcccactcactcctccctaacccccctcaaccagggcacagcgacttccggatgcagcgcactccccagtaatccctccgacgacgacgcagacagaaacctgcagggggaggaggaaggtcatggcctgggacctttcggcccccaagacagtgctgacttgccagctgcagtctccttacctggcagtctccatgatcacctagaccccatagaaagccgccagcctctccttgagcagcggcgggaattgctcagagaactgctgccagttatcttccccaacttggtctttgaagccgtggagaatctgtggggagggtggtggtgaggggtaggcaggggcagaacaaggggagtgcgcctcttcccccatccccaggccccattgttaccagatggtctcacccctgcctgctcccggaactagatcagggcccagacagagcctcaccttataaaacatgtcccgaaggtcatccttcgggctcacccaggaggctacagcatcgcagaagaaaataaagtcctgaaacgtgacggatcccaggtgaggggccgcccgagcccagcgcccgcgcctgccctcagagcccagctgccccaacctgcacaacgccccccgggttgacaccgatcatcatgcagatgccgcggaaggctgagtccttctcctcgttgtccctgatgttcctgagggacgtgcacctgtgggaaggtgagcagctggaggtcagagggcaggctgggcatgcatctgtggagggctgggtcactggggatcagtgagtgggcctgggacatgcatctgtgggggtggggcagggcagggagtcagtaggcagatggggctggaaatgcacaggcgagggagggggttgggccagtcccgcccaccacacagcaggcttgacacgtggacacacaccaaggccggatgaactgctgcagcatgggtgccacctcctgggggcacacgtagcccaagcggccgatggtgatggctggaatggcagagggactcgtcaggcgacctgcaaccccgagcggccccgggacggtacgtggcggggcctctggcacaaggcaccaagccccgccccatgagccccaagggaatggctactgcagccaccctggtcccccaagcttggcccagccaggggtcctcctcatcacacctgagtcacttcccaggtctctctgcatctatctttctttctttcctttccctttcctttttgtttttttttgttttgttttgtttttgagatggagtcttgctctgttgcccaggctggagtgcagtggcatgatcttggctcattgcaacctgcctcagcctcccgagtagctgggattgcaggcacgtgccattacccccggctaatttttgtattttttagtagagatggggtttcaccatgttggccaggctggtctcgaactcctgacttcaggtgatctgcctcccaaagtgctgagattacaggcatgagccactgcacccagcctgaggctgcatctttcttggggcttctcccagtgaccccttccaggtacttccagacaccctccttggttccttgacaaggctctttctgatgcccttcccagcccagaaccccacctccagaaggcaggcaggggtgcaggcagcagccgggccaggtgcccacctgtgttttccagcagtgtcttgggtgtgttgggtcggttaatgatttccaccaggttgttgaggaccatctgcacataaggctgcatctctgcccctgggggagcacccagtcagagccctgcacagcccccgccacccacaggggccagggggccgccccacctcactcactactcgccccagttccaactagagactggccaaccactaccagtgaggaaacaaaagaccttctccggctaatccccacccagaatccctggccaaccagggacagacccacaccctccaaacaacagaggcttctctggagtcgctaaggtgacaacacgctgcccaagtcaaaggaaaaaaaaagccaaagtcacccaaccaatccgaatgagtcttttagccaactacacaaaacggtccaatcagaacagccctcctatccctcctctttagagaagccaatcacaaatgacctttctgcttggctccacccctgacgacccccaagagacttgccttgaaggaagctgtcagtcagagctaggctcccgcccccaggttgagaacaggctaatggggggcgcgtgttgccacttgcagggcactcacccatctgcatgcagatttcaccaatggcccaggtggcgttgttgcagacggagatgaactctgggttcaggttggtgcccagaatgggcatgaactcggctggtggggagaaacaggggtgctgagaaggagggccagccagggtaagctgcaggacctagtccagcaggccccatcagacagtacgaatacatcccaatgtggtcacagtcatccccgggtattgctctccatcacttgaggccggggctggggtcatgggttagggacaaggcgagtgtcgtaccgatacagggcttgacatggatgaagcaggctttggtgaggtctcccaggagggcaaaggagctctgccggacctcaggcatcgagtcctggggattcaagtaagatcagtgtggctaggctcccctccttctaaccaggacagctcagggggcacagtccctggtgcatgtccagcctctgccactttccagttctagagctcctagctgttccttaacctccctagcctccagcccacatctgcaaatgggagatggcagtgccccaacggtcatccctcagtgtccgtgggggattctttccaggtccctgcagatataaaaatccacggatgtgcaagtccttgatataaagtggcacagtgttagggccaggcgcagtggttcatgcctgtaatctccagcactttggcaggccgaggcaggcagatcacttgaggtcaggagtttgagaccagcctggccaacatggcaaaaccctgtctttactaaaaatacaataaaattagccaggcatagtgggacacgcctgtagtcccagcttcttgagaggctaaggcaggagaactgcttgaaccctggaggtgaaggttgcagtgagccgagatcacaccattgcactccagcctgggtgacagagtgagactctgtctcaaaaaacaggtggggggcggtggggggggcatagtgtttgcatatgcacctatgcacattctcctgtacacttagcatcatctctaaatcacttatatctaatacaatgtcaacagtatgggaatagttgttatactgtattgtttagggaataataacaagaacaaacttctgtatgcgttcagtacagatgtaatttttcctctgagtattttcaatctgaggttacttgaatcttgggatgtagaacccacagatacagagagccaactgtgctggggcagggacttgggctttcacattttctattttcttttctttctttttttttgaagacagagtctcagtttattgcccaggctggagtgcagtggcatgatctcagctcactgcaacctctgcctcctgggttcaagcaattctcctgcctcagccttccaagtagctgggattacaggcgcctaccaccatgcctggctaatttttgtatttttcgtagagacaggatttcaccgtgttggccaagctgctctcaaactcctgacctcaagtgattcacctgccacagcctcccaaagtgctggattataggcgtgagcacctggcctcacattttctattttcaatactgtttgctttaaaaaaaatttttttttttaattttagaactggggtttcactatgttgcccaggctggtctcaaactcctgggctcaagcaatcctgcctcggcctccaggattactctttaaaataattagaacagcaccttttccctgatttcctttgggcacaaccaggccctgactccccaccaggggcagcccacgcaggctgctgggtgtcatcactgtccagggtccccacccacctgcatgcactggaacagcaatgtcatgatgttgctgcgggccaccagctgctccacgtgaccacccaggccctcggccaggccgctgagcagatccagtgctacgatcatgaagtccttgtcgggagcctcatactgctcagggtgctgggtgtacatctagacacagatgccgacaggggcacgggtaagtggagcaggcccgaggcaggccaatgcagaagcacaggtgacgggcctagggttgctcaccatggcctgagccagtgtcttctgcaccagggtgacacagcgctggtagacgggctcacagtaaggcaggaagccactctgcagggcggtggccaccgatgacagacactggcagggaggaaggcaggtggggagaactcaggcagggtgggcaggatgggtttcgggtgaggggcaggagcccactcacctccagcagggggaagaggtccttgtcttcgtccttgagctcattccacttctggatcagtgggggcatcagcttctggatgtattcctggagagggagcacgaaatgggcgctccctgggtcggggtggcagactgtgactcaggtacctgttgcccgagtgatgaggcctgagcgcctcaccgtggctcatgggaccctgaaaggcctgccatctggccagacctcgaggccttcattcttctcacctgtccaagcaccgcccgccccaccccaccccccgggagcctgggttaccacctcctggttcccgaagcacagcacttaccacgctgtctcataactgtctttctcccccactagactgggagcagggcgagggcggggccgggtctgtctgtctgcctgtcgaggtcacggccacgtccctggcgtgcaacacggggttgccaccaggtcactggatgcccaggggcacggggatcgggaggcgggagccgctctggggtctcaccggctggttgaggtggtggcctacagagtcggccagggtgccaatggcgtcatagaggatgagcaggttcttgtgctggtatttcccaaaggcaaagacaagggtgtccaggatgtagctgaggtagggcaccagctccgtgcaggcctcttcctccagggtggcaaaagcactggtgggagggaggatgaagcgggggctcagtggaccatggcaggtgacactgggccatgggcagttggggagggcaactcaggatcagccagtacgaatacgcgataaatcagttccacatcaacagtcacaggtgtcatcacttcccagagggtggccgggggagagtgggggctgtgggatcaggggtccagggtcacctgcaggccgcctcctgtaccctcttgttgccatccaggatgcgtttgagcagctctgtcatcaggggcttgaggtgcatgtcgggtggctggctgaccacccagtgggcatagcggctcagcgtccagcaggcgatggagcggaccaaggccttcttatccgacaggcactggatcaggtgcgggatcagctcaggcaggtagggcaccatgccctgcatgcagcctacaaggaaagggaaccaagagggggcagtttgattgggcccagccacacccaccgtatggagagaagagtcagccgcacacaacatatagggaaactgaggcttagagtttaaatcactggcccagactcatttcacagagccaggtaaaggcaggcacaggaggggaaacaacagaagcctctcatcccaaagccccgggttatctttatttttttttgaggcagagtctcgctctgtcgcccaggctggggcgcagtggtacgatcatggctcaccgcaaccttcacctcctggttcaaacaattctcctgcctcagcctcccaagtagctgggattacaggcctctgccacaatgcccggggaattttttatattttcagtagagacagggttttaccatgttgaccaagatggtctcagtctcctgacctcgtgatccacccgccctggcctcccaaagtgctgggattacaggcgtgagccaccgcgcccagccaaagagctccgtgttattgcgttaattcaattcatgcattaattcatgtgttaattgaattcatgtgttaattcaaaattggctccgttacatagtgagtggggttttatggggcagcagtgacccaaatggaataaaagcactttgcatttgaaacagttcttaagatgtttgtgagttttcttttttttttttttttttttttttttttgagatggagtcttgctctgttgcccaggctagagtgcagtggtgtgatctgggctcactgcagcctctgcctcccgggttcaagtgatttcctgcctaagcctcccaagtagctgggactgcaggcgcccgccaccatacccaactaatttttatatttttagtagagacggggttttaccatgttggctagactggtcttaaaatcccgacctcacgtgatcccacctcagcctcccagagtgctgcgattataggtgtctggccgtttatgattgttctatttctccttatttttgtttaattttttaatttattattattatttttttgagacggagtcttgctctgttgcccaagctgaagtacagttgcacaatcttggctcactgcaacctccgcctccctgattcaagcaattttcctgcctcaacctccccagtagctgggactacaggcgtgggccaccacgtgtggctaatttttcatatttttagcagagacgaagtttcaccgtgttagccaggctggtctcgaactcctgacctcagttgattcaaccgcctcggcctcccaaagtgctgggattacaggcgtgagccactgtgcccagccatttttaacaattttttaatgttttctttgagacagagtctcgctctgtcccccaaggaggagtgcagtggtgtgatctccactcactgcaacctctgcctcccaggttcaagtgattgtcgtgcctcagcctcccaatagctaggactacaggtatgcaccaccacacctggctaatttttgtatttttagcagagatggggttttgccatgttggccatgctggtcttgaacccctggcatcaggtgatccacccgccttggcctcccagagtgctgggattacaggcttaagccaccacacccagggtttttttttttttttaaaatatcacgaactctgctcttttatttaaagagaacaaagataatagcacattgccaataatccaagacacaagatctatgtttaccagtttgagctcaactcctatagatctttttaccataaacatgtaatacaggccgggtgcggtggctcacgcctgtaatcccagcactctgggaagctgaggcagatggatcacctgaggtcaggagttcgaaaccagcttgaccaacacagtgaaagaaaccccgtctctgctaaaaatacaaaaatcagccaggtgcggtggtggacacctgtaattccaactacttgggaggctgaggcaggagaatctctggaactcgggaggcagaggttgcagtgagtcaagattgcgccattgcactccagcctggacagtaagagcaaaactccgtctcaaaaaaaaagaaattagccaggcctggtggtgaattcctgcaatcccaagctactctggaggctgaggcaggagaattgcttgaacccgggaggcagaatgttgttgcagtgagccaagatcacaccactgcactccagcctgggcgataagagggagactccatctcaaaaaaaaaagaaaaaaaaaagaggccaggcgtggtggctggctgggcaaggtggctcacacccgtaatcccagcactttgggaggccaaggcaggcagatcatgaggtcaggagatagagaccatcctggccaacgtggtgaaaccctgtctctactaaaaatacaaaaaaattagctgggcgtggtggcatgcacctgtagtcccagctactcaggaggctgaggcaggagaatcacttgaacctggaaggcggaggttgcagtgagccaagatcatgccactgcaccccagcctggcgagaaagcaagactcagtctcaaataaataaataaataacacagcttatgtaatctattaacatatgtaagcgtattgtgtgatatataccctattaacatgagatatgagatacattaaacacatattacatgtcgaaacatttctttagacaatttttttttgagacagggtctcagtctgttctccatgctggaacgcagtggcgcaatcatggctcactgcagccttgacctctcacctcagcctcccagttagttgggactataggcacttaccaccacgccggctaattttatcaggttttttttttttttttttttggtagatatgaggtctcactatattgcccaggctggtcttgaacacctgggctcaaacgatctgcctgcctcagcctcccaaagtgctaggattacaggcatgagccaccacacctggcctttttaaaaaattttttgtagaaagagggtttccctatgttgcccaggctggtctcggactcctgggctaaagcagttgtcctgcttcagcctcctgagtagctgggattacaggcgtgcaccacagtaactagacaaattttagacaaattttgaaagcttacaaggttgagggtttttgctgccatgcctgaaatttttggcacaggtctggatgctgaggcaatggtatatgatgcctccaacggactcacaaagccctcctgtaacaagttttatgtcccaccgggaccatgggagcctgaaaaccccaccgattacagaacaccaggttgaatttgatgaaacaccacctaccacgggttactactgactctggcaggccagcccggcagccaggaacaggtttaaggcccagacacaccctgagtgactgtaaggaagtggcatcaatctttctgtacctcagtttccccatcttcgaaactgggatccggcacccagctcatcaggtggtggtgagggccaaggatgtttgtctacataagtgcacgaggcaagcatgcagctgtgcctgctgttattatcattgttgctgtaattatgcttacaacatgaaagaactacctgcctgcaagaatgaacaagaggccttgcactgtggggctccaggggttcctttcaggcccaggaaccaaggggagaattgagatctcagagctgtttggagtggggtgagtaggcctccagggagaactgaggcattggtgtggctagtaatgtgggccagccctacagtctcatgccagcacagggctcagagatcaggcgcactcaccctcagcaatggcgcccagcaccaggatgcccgactccttgaccacccactcggggtggaagaggaggcctttgagtagtgggagtaggtggggcagcagttcctcccggaagacattggcgaggacgtccagtgcagccgctgagcacttccctggggaagggggaacaatggggaggctcagggcggcccctcaggcaggtggccgaccctccttgactgcactcccaggatcagagatcatgctcagaatcttcacgatcagcttctttttttttgttttgtttttttgagacggagtctcactttttccgcccaggccggagtgcagtggcgctatctcggctcactgcaagctccgcctcctgggttcatgccgttttcctgcctcagcctcccgagtagctgggactacaggcgcccgacaccacgcccgactaattttttgtatttttagtagagacggggtttcactgtgttagccaggatggtgttgatctcctgacctcgtgatccgcccgcctcagccttccaaagtgctgggattacaggcgtaagccactgcgcccggccacgatcagcttctaatcagcttctgcctcagcttctagtcacctcccaagagggagtccagggcttgccaccccaccaccacccccaggcaggggcacacactcaaattccagtcggacagagcatcatcatcatcgtcatcctccgcgtcctcggagccatcaggccgctcagcctcgtggggcagtgtgaccgtgcgtgacttgtggaagcgtggcttgatgtcctgctcactgtcggggacagcctcatcctcctccacatccccctgggggacaggcagactgttaagtactttggggaccacagccgcgacacccacgcccatgcccacccatgctgggtgggccctgcctgaccttgagcaggatgatgtcaatttccgagtacttcatcccattcaccaagatggggatcaacctgcacagagagggactgtttatggggatgcaggggccgtggcaaaagttggggggaggcacagcttggggaggaggcaaacaggtgccaacagagtgaccagccccccaatcagccacagagcagaccctgcagagcatgatggtactgctaggtgcaaattgatccatttccctctggggaattatcggaatctagtctctgccgctatgattaggatataaatgataccactcctgcctccagagaaaggtttttttttttttttcttaagaagcagggtctaaccctgtgggcggcaagccacccaggcaccgaggcaagagacagaggacacgagctgttccagtataataaaatataaaacaagaatagttataccagatatagatcttagatatgattatatatgaatatcattaatcattagtttgtagcaattactttttattccaatattatgataatcctcgctctataatcatagcctaggaaaaaccaggccatacagagataggagctgaggggacatagtgaggtgtgaccagaagacaagagtgcgagccttctgttatgcccggacagggccaccagagggctccttggtctagcggtgacgccagcatctgggaagacgcccgttaccaggcggatcatggtccagcggtagcaaaaggtgtcaaggaacaacacccgctacttagcagaccaggaaagtgggggagtctccctttccccgggggagtttagagaagactctgctcctccacctcttgtggagggcctgacatcagtcaggtttgcccgcagttatccggaggcctaaccgtctccctgagatgctgtgcttcagtggtcacactcctagtctgccttcatgttccatcctgtacacctggctctgccttccagatagcagtagtaaattagtgaaaatactaatagtccctgatatgcagaaataatggcatacgctgtctttctctttgtctactctccctctctgcctcggctgccaggcagggaagggccccctgtccagtggacacgtgacccatgtgaccttacctatcattggaggtgactcacattctttaccctgccccttctgccttgtatgcaataaataacagcgcagccagacatttggggtcactaccggtctccgcgcattggtggtagtggtcccccgggcccagctgccttttctattatctctttgtcttgtgtctttatttctacactctctcatcgccgcacacaggaagagacccaccgaccctgtggggctggtccctacgtaaccctatcacccaggctggagtgcactggtgcgatcacagctcaccacagcctcatgctcctgggctcatgcaatcctcctgcctcagcctcccaaagtgctaggattataggcgtgagccatggcactcagcctgcaggaaagctcttgacccaggcctggccactcagtggattatagacccctgaatacactgaaaatcttggtacagtgcctggtccctagcacaacattaaggcagggacatgcggtcctattcctggccactttcctgagatagggcagagactagccagagtaggggagcaaacagactaggcagccagcccctcagctgcagcccagagttgtaagtgacagagccttcatcacctgctcatctaggtctcatcactccccaggagccgtctgcccagccctagactgttatcaataatttggggccgggcacaggggctcacacctgtcattatagcactttgggagaccaatgcaggaggattgcctgagcccataagtttgagaccaattgggacaatatagtgagacctcacctctaatgaatgataaataaataaataaataaataaataaataaataaacatacaatatgctgggcgtggtgactcacgcctgtaatcctagcactttgggaggccaaagtgggcagaacacaaggtcaggaagctgaggcaagagaatcgcttgaacccgaggggcggaggttgcagtgagccgagattgtgccactgccctccagcctgggcagcagagtgagactccgtctcaaaaacagaaatttcaaaataataataataatgatctgggggctgggtacagtggctcgcacctgtaatctcaacactttaggagaccaagacaggaggactgcttgaggccagggatccgagaccagccagagcaacttagcaagacctcatctctactaaaacttagaaaagattagctaggtgtggtgggatgtgcctgtaatcccagctacttgggaggctgaggtaggaggattgcttcagctgggaggtcaaggctgcagtgagccatgattttgacactccactccagcgtggatgacagagcaaaaccttgtctcaaaataaaaaagaaaaaaatgatttggagagaggcaagcaatccaagtttgtcaaggagggtcagttttaggacttttgttggaaacactggtcgaaaatttctttactctgaagttcctaagctggaagggcacagaaggctacagcactacccagagggaaggttgtgcctaagaatgaagccaacacaagggaagcagatctgagaccacaaagatgcctttcacatcctttgagctcctggatacagccatacccctgaagcctttgttgatttttcatttcttttttttttttttttgagacggagttttgctctgtcacccaggctggagtgcagtggcacgaccttggctcactacaacctcagcctcctgggttcaagcaattctcctgcctcaccctcccaagcagctgggactacaggcgcctgccaccacgcccagctatttttttatatttttagtagaaatggggtttcaccgtgttagccaggctggtctcgatcttctgaccttgtgatctgcccgcctcggcctcccaaagtgctaggattacaggtgtcagccaccacatgtggccattgatttttcatttctttccacctatcagttacctaattttgaagtcttcaaaaagtggcattcttaccacttacacataaatatatactgaatgtaaactgacaaggatgtggactgagagaagcacagcaggtgaccagaagggaaggcagaggcatagcaaggggtcgaagctggggtaggacagtgggcagcagcagcactcactggaccagatgggaggccaggacttccttgcagatgggctgctcggccagcgtcagccagaactcacaggcctcaagggcaacgttctcatcatggtcctgggtcctctgcagcatgtactgtggtaggggggagaagctgaggcctggcctggctgggggtggctccctgacccctgccaccggccccctgcctgcccgcctgggctggccttgaccatgcacacctggatgatgctgtgcatgtgggggatgagcctgtcaatccgcacttccagaagcatcaccagggcacggcacacattcttccgcacctcggggtcatcatccacagccagggcaaataggtgctgcagggaggaacagggtcagttgtaggggccctcagtcctcgccctgcccacccccagcccagcggcccacctcgatgaaggtgtcaatattgtccatcagcgcctgggcccggtccatgatgaactggttcacgcaggcgatggcgtgggacctggcggggagcagacacgtgggtcaccctgaccctgcccactccaggctccctggaagcccccagggagctgcacccaccggatcttgggactgcagtgcttgaagaactgcaggaacttggggatcatgatgttgaggggcctgttgagggcgtcactgtccagaagctctgatgagtcttcacagatcttctgcagggctccaaaggctccctgagtgcagaggggcagagagacaaacgtgggtggtgggtggtggtcccagccccccagtactcgctctggccatccatggcttcttgcctacctcacaagtgttgtaatcctccgagttaagcaggttgcagagctggggcagcagctcgggccacatctgcagctcacccttggaagcgatggtggtgatgagaatgcctggggcggccgggaaaggacgctgcctgaggctgggcaggggctgcctagcacctccccctcccactggacacccccagtgctgcctttctgttccctagcccatgtacgccctctacatcccccctccttttttttttctttgtaagagatagaattagctctgttgcccaggctggactgctgtggcacaatcaatagtccacagcagcctcaaactcctggcctcaagccatcttcctgcctcagcctcctaagtagctgggactgcaggcacatgccaccacgcccaactaatttttaaaattgtttgtagagatgggatctcactatgttgcccaggctggcctaaaactcctggcctcaagcaatcctcctgccttggcctccaaaagcactgagattacaggcgtgagccaccgctcctggccttgacataggtagaagggtactccttgactcagtaggcaccctgagccttactgtgagtcaactctgttccaggccctgaggcacagcacagagcaaaacacaaaatcctcacccttgggagctggaagcaagctatgaagtaaagataaattagcaaaaaaaactgggaggggccgtgcatgggtggctcatgcctgtaatcccagcactttgggggaccgaggtgggtggatcacttgaggtcaggagttcgaaaccagcctggccaacatggtgaaaccccatctctactaaaaatacaaaaattagctgggtgtggtggggggcaccagtaatcccagctacttgggaggccgaggcaggagaatcacttgaacctgggaggcagaggttgcagtgagcagagatcgcgccacagcactccagcctgggatggagcaagactccatttcaaaaacaaacaaaacaaaaacaaacaactgggaggggccacatgccaaggactaaggggggaaatacagcagaaaagatggtgagaaagggctgtaggtgaaggtagcaactttaaattgggtggccagagcaggcctcgttgaggtgacatcttgatatctgagccaaggcctgaaggaggtgaaggaggcgagggaggaatcatccaggtttctggggaaagggcatctgaggcaggggactctatggtgcaaaggcctggcgtaaggacaggcatgatgagagagggaaaggaggtaagggcaggaaggtggcagggatgcttgtactgcctattagatatccaggagttacatacagcaggcatctgaggtgccaggacagtgcacatatctggtgacagagctggatatgggttctgttaagtgcagagatggtatttgctgccatgagatggcagtgtttcccaagggtggaaactcaacgagagaaaggtgctccctgcaatgggtaggtacacagtgaggattgtggaactttagccacaccccctcattctgtgtgcctcagtgcttccagccctcagaagagataaagaaaaccagcctcctaactaaggttatcagtaggtttctttttctctctttttttttttttttttttttgagatggagtctcactctgtagtccaggctggagtgcagtggcacaatcttggctcactgcaacctccacctcccgagttcaggtaattcccctgcctcagcctctgaagcagctgggattacaggtgcccgctgccacactcagcaaatttttgtatttttagtagagatagagtttcaccatgttggccaggctggtctcgaactcctgacctcaggtgatccacctgcctcagcctcccaaggtgctgggattagaggcgtgagccactgtgctcagcctggatcagtaagtttcaatgacttagcaaagagcctggcacatagaatgagctcaggaagtccacatcctactactggcctgggagggggtttttgcaggactaaaagttactttttatttttgagatggaatctcagtctgttgcccaggatagagtacagtggcattatcttggcttactgcaacctctgcctcccgggctcaagcaattctcctgcctcagcctctcgagtagctgggattacaggtgcccaccagctgtaattcccaagtaattttttgtattttcagtagaaacggaatttcaccatgtaggccaggctagtctccaactcctgatctcaagtgatccgcctgccttggcctcccaaagtgctaggactataggcgtgagttaccacacccagccagaagtcattttttttgtttttattttatttagttttttttgagatggagtcttgctctgttgcccaggctggagtgtagtgccgcaatctcggctcactgcaacctctgcctcctgggttcaagcaattctcctgcctcagcctcctgagtagctgggattatagatgttcaccaccacgcccagctaatttttttttttttgagatggagtctcgttgtattgccaggctggagtgcagtggcgccatctcgcctcactgtaacctccaactcctgggttcaagtgattctcctgcctcagcctcccgagtagctgggaccacaggcgagtgccaccacgcccagctaattttttctatttttagtagagatggggtttcaccacattggccaggatggtcttgatttcctgaccttgtgatccgcccacctcagcctcccaaaatgctgggattacaggtgtgagccaccatgcctggccagctaagttttttgtattttaagtagagacggggtttcaccatgttggccaggctggtattgaactcaacctctggtgatttgcctaccctgacctcccaaagttgctgggattacaggcgtgagcctattcttagtcatctttctgtaacttcctcaggccaccttccaagagtcagaaaaggctctgctgaaaacctaattccgttgcacctgaaacatgaatacctgcattattttaactgctatacccttagcactcagcccaaggccgaacacaaaattctagatgttgcatgactgtctcagagccaagaaggactgtttcaggagggagtggttccagagcgtggccctgcactgcctcagctgtttctgacttctgctgcttacccagacaggtcccttaatagctcagcgcctcagcttcctcatctatcaaatggcaatagtaatagtactaccatagagggtgccagagcattccatgaagcactacacttaacatgctgagaagtgagagttcagtgtgtcctcagaggccaacccccgctgcccctctcaccaatggtggctcggatgagcgaggaggcatcgccaatgttgttgagacactcctgtttgatgaagtctgccacagggggtgggaagctctgatagtgtgccttcacgttgttcttgaggatgaggccactgagagagcgcgttggctcatctgggaggaggaaggctgaggttcaggggcccagggggagaaagcagggtcccgatcgcatggaagggagcagagggcgtaccttctgacttgagtctggtcaggacgaaaatcaggtagttgttgaagtcaggaaactgattgagttgtttgagtttctgccaggctgttaagggacttggaagacagaggccttcccccagccaggtcccctcattatgtacctgacactatctctgaccactgggaccaggctgccagctcctgggggatcccgctccctaataagcccacaatgacacagagcacctcagacacgtcaaattcatataaggggccgggcgcggtggctcacgcctgtaatcccagcactttttgggaggtcaaggcgggtggatcacaaggtcaggagttcgagactagcctggccagcgtggtgaaaccccatctctactaaacatacaaaaaaattatccgggcatgatgtgtgcgtgcctctattcccaactacttgggaggctgacgcaggggaatcgcttgaacccagcaggtgaaggttgcagtgagccgagattgcgcctctgcattccagtctgggcgacagagcaagactccatcttgaaaaaaaaaaaaatcatacaaggagttgggtggaaatgtctgagtttcccatccactcctgaagacccagccagagcaggagagggaaggagaatcccactcctcttaaagtggcagctactagtcagcgatccccactaacaggccatgaagactttttttttttttttaaaagagggaatccaaattttggggtgagtcatgctcatggtttaaatatttatttatttattttcagacagagtctcactctgtcacttaggctggagtgcagtggcacgatctccgctcactgcaacctccgcctcccaggttcaagcgattctcctgcctcagcctcccaattagctgagattacaggcttctgccaccacacctggcttaatttttgtatttttagtagagacagggtttctccatgttggccaggctggtctcaaaactcctgacctcaggtgatccgtccgcctcggcctcccaaagtgctgggattgcaggcgtgaaccaccgcgcctggcctatatatcttttctttgagacagggtctggctctgtcgcccagggtggctggagtacagtggcacaatctcagctcaccacaacctctacctcctgggctctagccatcctcccacctcatcctcccaagtagctgggactacatgtgcatgccaccacacctagctattttttgtattttttgtagagatggggtctccctatgttgcccaggctggtctcaaactcctgggcccaagcgatctacctgcttcggcctaccaaagtgctccgattacaggcatgagccaccccgttgggccagggcctactttaatagttaatggagtagatgctagcgttcgatgaacattaggaattttcatcattttctataacaatccccgcagctctggaaatgggacccaggaattgtaatccttctctgtccagggcagatcctccgcacagcagaaaaaatctggggactaggggagtcagtccctctctttctctctctggcctttggaaactgcacgcatctacccggctcccccagccccggaaggaaggaaggatacatcctgcacgatgcgctgagtggctgtgttgggcgactgtgagtctttgagcagctgcaggacctgctgcaggccctgctcgtctggctgccagtccatggcgcaaggcaagctgcggaggtaggggccggggtcagcgctgggtctctggggctccgtgtgagacccaggtggagcccctgaggccgcggtggccgcatgacgacgggaacgccctcggcggacaggcggaggcctccgatccacgcccgcccaagtgcggggtccccgccagctgcgccatcctcggccgcgcagtcgcgggctcgggagcgcgggaggggggatgtggaaacgggccacaggcggcggcggcggggcccggcggatcctcatgggacccagcgaagagccctcgtcccagggtggcccatgccgctgaccccggctccgagcccgaaggcttccacctccctcgcagcggctgggcgagggcccagccgcctccacatccaggggccccgccccagaccgtgatagcgccccggcccccgtggtctcttctatgcaggcacagtccctgaagagtccccttcccccgacactctgcccttaacttctgccagatcccagaggcctcctgccctagtccaatttctgagcttccccagatgcgccctcccaagacgatcgtcctgatctctcctgtcccctgttcctgcccttcaagctcagtggatgccagatatccccctctgtggcctagccaaattctaaggattccccttaatcaggcccaaagcagtccccaggtaggtctctgctgcctcttcgaatgagagccagccaagcccggccaacccactataggagccccctggaccgatcccagtcgccttccccaatcaggtctggccaagcctctccctgaaattccctccgaccctgtcagcagtaacccctgctgacggatctctgttgcctctcccagtcaagttcggccgagccccccaccacctcgtgtcagtaaccccctggtccgatccttgcagcctcccccagttcggcctgggtaaacaccccccggggcattcccctcaacggatcccagcaacgcctcgaagtcagatccaagaaaaccctctaggccgaagtctgacgcccctccctgtcaggacccaacgagctcccctccccccaccccgctcaacttttcagtgcggcctcccccaatcagacccaaccaagccccaccgaaacaggcccctacacacacccgatcctcgcgacgtcccccaatcaggccccaagcagtccccagacgcttcccccaatcagatcccctccagcccgaccccagcagtcccactggccctcttcttgaggagccccgacatggcctggctccgaggccccaccccctaagctctgctcggttcccccctcccccgcccggcccgttctagctgccaggaggatcgggcccaaccggcttcccggcctttcccggtcgggcgcggccccgacgcccgggccgcgcgcggcgcaggctcggtgcccggcgggggtcgacgcaagccggggccaagagggtcgggctctgagtgaggcccacttacccggccccgggcagcagcggcggcaactcgcgctgcggcttctccagagactcgcgcggaaggagggagccaaagagagagaattaaaaaaaaaaaaaaaaaaaaaaaagaaagaaagaaaaaaaaaaaagaaaaacgcggccgtaggtgagccgccgcggctcccgtactccgttcaaactggtcccgccgagccaatcggaaggttcaaccttcacacgtgccctggcacttgggaaacccgggctgagacaaggtccggtcacgtgaccaaagagttgccgtttctttggcctctctagccagccggtcctcccagtgtctcgttttcccagcatctttcactgacctgaccgcaagctctttagctggagccaggagtttggtagcgcgtggggactttgtgtgtgatggatccaggaacccctcggccagagccagcaccctccttgtcaccttcctccactaaaaattgaaatgtgcctcccttcccccatccagaggtacttgggaggagtacgctgtgtgtgcgcaaggaaagagctgagcgtgctctttataccccagagacaaaggaaagaaagcaggacaaagtaagtgcctgagacaagccgggttcctacagaagcctctgccactttttgcattattttccagtactgtttgatagtttttacaaggagatgaaaaagccacaaggatataaatttttgaataaaacgaaatgaactaataaaataaactttgaaccacgcctaatccctttccctacctgaagttgaatgaggtggaacagcgcaggaaattctggcaagggcagggtcatgaagaaagaaatcttcttgatccttgcgacgtctgaagacagtagggcaccgtttttccttctcttgagagaggagcagatggtaaaaagctggagaccctgtagcgtcttggtttcccctccctgccctgccgataacaaagtgggagacctcctgccacttgaagcctcagtttccccacttgtcaaatgggtataagagcagttcgcgcgattagagatcatccaagttaagcatgacctggccagctctgaattgttccttaaaaacgtggctttaccctccaaggctcaaggctgttcttttactgtattcagcccctccctaagccgatatttaatgaattcaccagctctaatcccaaagaacaacccaccctgccctgaggaactttttgaccctcgagagaggcagaggtcaatttttgcccctgcctgaaggaggggaacagctatctcaacccacttgccgtaggcaaagtcagtcccggctccgttcattcatgaaaatcaagtcccgggcctccaaggttagggaagtgtcggcaggcgcctaactccactcggagaatcgcggaagacaccctaaaggagcagttgggattccgaggtagccagttccgctggactgaaacctgggctgagaaacacgtgcagaaagccgccaccaaggcatgcgtaaaggcctccctctcccccaccctccgataagccctggaactacaaatcccgtcctgccatgcgccagggtcgccgcgctttggggttttggctgagactcaaattggcaggagggtctctagaccaaccgaggtgcatggggagcagaagagtgagactggggagctggggctggatttgggggttcctggagcgagtgtgaacgataagagctttctggtcaaatttgggggctgccccagataaagatcagatggggagcgagtttgggatgcaggagacaatttgttaaggttcacccccttcatataatatggcaaattttcagcggccctccgcaagccttggggcagaacaaagtagcccctgctgcatgtgtggtccacattgttggcccttgtgtggtcacggaattttttcttcctctccagctggtgaatttgagtgttgaatcaggacaaggttttgggtttttgttgttttgttgtttttgtttttctatttctttgttttgttttgttttgtttttgagacggagtctcgctctgttacaaggctgaagtgcagtggcgcgatctcagctcattgtaacctccgcctcccgggttcaagcgattctcctgcctcagcctcccgagtagctgggattacaggcatgcgccaccacgcccggctaattttttttaatagagatggggtttcacaatgttgaccaggatggtcttgatttcttgacctcatgatctgcctgccttggcctcccaaagtgttgggattacaggcgtgagccaccgcgcctggctttttttgtttttttgttttttgagatggtgtcttgctctcattgtcccggctgaagtgcaatggctcaatctcggctcactgcaacctccgcccccggattcaagcgattctcctgcctcagccttccgagtagctggaattacaggcgcctgccaccacgccaggctaattttttgcatttttaatagagatggggttttgccatgttggccaggctggtcttgaactcctgacctcaggtgatccacctgcctcgacctcccaaagtgctgggattactgtgcccggcccagttttcctatttctttctttctttctttttttttttttttttttttttttttttttttttttgagacactgtcttgccctgtcgcccaggctggagtgcaatggtgggatctcagctcattgcaacctccgcctccgggattcaagctattctgcctcagcctcccgagtacctgggactacaggcacccgccaccacacccagctaatttttgtatttttagtagaaacagggtttcaccatattggcgaggctgatcttgaactcctgaccttgtgatctgcccgccttggcctcccaaaaagtgctgggattacaggtgtgagccaccgtgcctggccttttttccttttttttttttttttttattttgaggtggagttttgctcttgttgcccaggctggagtgcaatggtgcaatttcggctcaccacaacctctgcctcccgggttcaagtgattctcctgcctcagcctcgcgagtagctgggattacaggcatgtgctaccacgccctgctaattttgtatttttagtagagaccgggtttctccatgttggtcaggctggtctcgaattcccgacctcaggtgatccacctgccttggcctccccaagtgctggtattacaggcatgagccaccatgcctggccttttttcctatttcttaagcacctactgcatgtcaagtggtttccaaatgttatctcattaataccggatgtggtggctcatgcctgtaatctcagcactttgggaggccgagggcagatcacgaggtcaggagattgagaccatcttctggctaacacagtgaaaccctgtctctactaaaaatacaaaaaaattagccaggagtggtggcctgcgcttataatcccagctactcaggaggctgaggcaggagaatcgcttgaacacgggaggcggaggttgcagtgagccaagatcacaccacttcactccagcctgggcgacagagcgagactctgtctcaaaaaaaaaaaaaaaaaaaaaaaaggccaaatgttatctcatgcaaatctcacaacagccctatgcctggcaaacttaccctagttcaattagaagctctctgtgccaaaagaaactcacagaattggtgtccaaccagccgggcgcggtggctcacgttcatgcctgtaatcccagcattttgggaggccgaggcgggcagatcacaaggtcaggagatcaagaccatcctggctaacacggtgaaaccctgtctctactaaaaatacaaaaaaaaatagccaggcgtggtggcgaccgcctgtagtcccagctactcggaaggctgaggcaggagaatggcgtgaacccaggaggcgcagcttgcagtgagccaagatcgcgccactgcactccagcctaggcgacagagcgagactctgtctcaaaaaaaaaaaaaaaagaattggtgtccaaccgcgaatctgaaatgtgagacaaacgtgttctcaatttacagcagcctcccttcccaagcctctcatcacactgtcccccgagttcaaaggtcagcacttcaactaacttaacacagtccccaaacgcaagccaacttcttcaccctggaaagcactagctgttttaaacaatggcagggttagattctatgaatattgcccttactttagaacttgactctagagatgcttctttattttacccctatttgatagatgaagaacctgaagtacagaaaagctaagtgacttacccaagatcacacagtcaacaggcactagaatagtcagaagccagggctgtgtgactcaccaaaacctggatatgattctcctccctcttcagacttttctcaggtcagagcaggtaagtactgtaaagggatgtgcctggactttcagcctctcctgcctcttgacactagaatagaggctgagatgctgcagggcgacctacttcccaggcttctgttgctttttaaagatccagtctctgctggtggctttgggggaggaggaggtagggatggctccattagcttcctgtgttccctccccccatactccacccccaaggccaaagtcacacctgggctagcttagcatccccaaagtaggagggagagacctttcagcccacatgcaaagtaaagcagaaaaaccttattgtgtgttagcaggaagcgaaagaggaaaggtatcctattcttttttttttttttaattttttgagatggagtctcactctgttgcccaggctggagtgtagtcactgcaacctctgcctccccagttcaagcgattctcctgcctcagcctcccaagtagctgggattacaggcgtgggccaccacccccagctaatttttgtatttttagtagatagggtttcaccatgttggtcaggctggtcttgaactcctgaccttgtgatctgcccgccttggcctcccaaagtgctgagattataggcgtgagccaccacgacagctaggctgtttgttttttttttttttgagacggaatctcactttgttgcccgggctgaagtatagtggcacaatcttggctcactgcaacctttgccttctcagattcaggacattctcctgcctcagcctcccgaatagctggtattacaggtgcgcgccaccacgcccggctaattttttgtatttttagtagagacagggttgcaccacattggccaggctggtctcgaactcctggcctcaagtgatccttctgcctcagcctcccaaagtggtgagattacaggcgtgagccaccacgcccagccaacttttattttttgtagcaagaaaggtcttgctgtgttgtccaggctggtctcgaactcctgggctcaagtgatccacctgtgtctcggcctccccagtcactgggattacagatgtgagccaccattcttggcagggcagggtttttgtctgtttaggtagctgacttcacatagcagatgctcatcatttgttacatgagtcagtgctccaccccaacctgcacagactgcatctggcaaaatctgagagcctgtggtgtaccggggtaggcccacctcagcccactcccaggaccacagccctgtgccttccaccctctacttgctgaggccgtgtttctctgagtcttggtcctcttttgattgaaagtggaaggaggggccaggcacagtggctcatgccagtaatccctgaggccgcagatcacttgaggtcaggaaaccccggctctaccaaaaagataaaaattagccaggtgtggtggcacactcatgtagtcccagctactcaggaagctgaggcaggagaattgcttgaacctgggaggcagaggttgcagtgagcccagatcgcgccattgcactccagcctgggggcggagtgtgcctctgtctcaaaaaaaaaaaaaaaaaaaaaacgggaaggagggggctgggtgcagtggttcacacctgtaatcccagcactttgggaggccaaggtgggaagatggtttgagcccaggagttcccgaccagcctgaacaacacggtgagacttcgtctctacgaaaaataaaaaaaaaaaaatgagccgtgtctgatggcacatgcctgtagacctacccaggaggctgaggtgggaggatcgcttcagcccaggaggttgaggctgcagtgagctgtaatctcaccactgcactccagcctaggcaacagagggagactttatctcaaaaaaaaaaaaagaaagtggaagagggcccagccctaagctgggtaggagtgccaaggctgctcagctgctgccattcttgcctgggaagactggggtgagcctatagctgggggaccccccaacgttgctccaggtccagcaggtttgaggagttgggaggcaagggcatcttaaaacctgtgtgggtttggtggagaacaggtggagccaggcagcttctggctccaacaggatgggcagtggagccaggaggagggcatggaagggctaggtctgtgccaatgatcatgttctgtaaggttggacagagaaccccctcgccctctttctcttgagggtgtatgcatacagaagggacagactccagcctccctggaagggcttcaagtagctagaggactgagtggcccttcccccagtggagcacacagccccatggaatccagctctcagcactcctcacctcctctactaccaagatgcagtcccctccactcccctcctcagtctcccaggttctaccctcagcccccttcagtctattccccacaggagccagagggatcccctgaagatataaaacgtatgatgttgctacctcaaataccccccaaagccttctcctcacttaagaataaaatcctgggcacaacgcagtggctcaggcctgtaatcccagcactttgggaggccgaggtggatcacctgaggtcaggagttcgagaccagcctggccaacatggtgaaaccctgtctctaccaacaatacaaaaattagccaggcatggtggcaggcacctgtaatcccagctactcgggaggctgaggcaggagaatggcttgaacccaggaagtggatgttgcagtgagccgagatcgcgtcactgcacttcagcctgggtgtcagagacaagactctcaaaaaaaaaaaaaaaaaaagaataaaatcctgggccaggaatggctcatactggtaatcctagcagtttaggaggccgaggtgagagggttgcttgagcctagcagttgcagaccagcctgggcaacatagggagaccccgtctctacaaaaaaattaaagaactagcagagcatggtggtgtgaacctgtggtccctactacttgcggggctgaggtgggaggaggccaggaagtggaggctgcagtgaggcagtgagctgcgatcgtagcactgcactctagcctgggcgacagagcgagaccatctcccaaaaaaaaaaaaaaaaattcctgaattctccccaccataatccattcatccatcctcctcacttaggaggcccccatcaggcccaagctgtctccaacctggctgttccctctgcctgggactctgcctcacctccctcaggactctaatcaaatgtcacctaaaagacatacccgcctcctccctagctgcaaaagggcttcccctttttgtttgtgtctgtctccttctgtaagggcagggagggtgtggtctgcgtgctcccagctgttgtcccagagccttgcagagccctggcacataatagatgctcctaagtgtctgctgaatgcacaatgcaacagctttggccaagccaaaatggaactgtgaagagaaagtgagcctaaggtggcacggtagagatgcagcagtgaggggagataggtcttggggaaagtccaggcctacaggaggggatgtgcccctgtccttcctaacccttccatatcccgctccttactgggtcaggcccaggctttgacaggtacaatgccagcaacagggggaaggcttaggtccgacagcgcaaagaagacaaaccaagcacacagctccggcactaagtcaagttctttacttcccagaagtgatggctaaggggagggaggagggtgagaagaggaagacagaaagagccagagagaatgaggaggtgagaagggggggacagtaaaccactgttctatgaagtctcacgaggcaagtgctcaaggtaaaaaaagagtcctggagaatcgtccacggctgcgggaagcatctcggtttccttctgcttttaagtcctctcagggaaggctgtcgccgctgccgctgcattaaatagttatgtacatcgcagagagtcccaggccatgggcaggtgggggaggggcgtcatttcaccaggggccgagttttatcatcgtcaccgcactggtgagctttgtactttttcacttctgccatgtacttggcccacgcgtcacctttacttgttaatacctgtggaaaggggatacgggttaggacgggggtgccaggaaccagggtcaggactgccctgagacaggtgacccattcccagtgtcacccagaagactctgggtttgagctgaagattataaagtcaagttatctggggacccattgacagccctcctaccctgccaggcacactcataaaaggcctggataccagacagggagggagaaggctgggcgcaaaagctggaagggaaaggcaatgtgggtggaccccctgcaccaagctggctcacctcatcctccgtcttctgcttcttggctactattcccgtcttgagggctagtttgttcccgcctctgcgtttgcccacctgggtgaagggacagaagactgcaacggttacaggagccgggaccgcccttggcggcgctgaggcccactacaccttcctagcccggcctggtggcccgtcctgacgccgcgcccagctccgccagccggccgacctgcgcagcaatcagagaggagcacacgcgactcagcgcctgccctgggcccgcggtgccctcccagggagcaagaagagtgtccacctcagtagggaccagctctgttctcactttccacgccaaggcctcaccctccctagcagggaccacaagaggtggcaacagctccctttattgagcatgtactgtatgccaagccctgtgccaagtgctgtggatgtatcatctcctttcattttcacagctaccctaagatgaaagttagaaccaccccctttttgaccaggcgcggtggctcaggcctgtaatcccagcactttgggaggtagaatcgggtagatcacctgaagtcaggagtttgagaccagcctggccaacatggtgaaaccccatctctactaaaaatacaaaaacttagccgggagtggtggtaggcgcctgtaatcccagctacttgggaggctgaggcagaagaattgcttgaacctgggaggaggaggttgcagtgagccgaggttgcaccattgcactccagcctgggcaacaagaagtagactctgtctcaaaaaaaaaaaaaaaaaaagaaaagaaaaaaagaaccacccccttttcatagatgaggaaagtctttcaggagaggtcatgctaacaacaaacaatggagctgattcagggtcaggtgggtcgaagcctctggacagcatccttagacatcaagcaacattgccttccctgtgcctagcctggcatggcctctttgagggtgcagccaaaatggcccctcaatgaacaaatgaaaaagatgcaacgacgactgctactcccattcatgaagggactccactcgcaggtatcacaccaaccctggtcctgacgcttttccttccttacccttgcctcaaagagtcttcctctagcctttcatcctgtatcccaccttctcccattgattgagggcttcctgcgctccaggggctccaacagtcttcacagacaaccaggcattcagtaacctgtgctgctgggactatttccatttttttttttttttggagacagagtcttactgtcgaggctggagtgcagtggcatgatctcagctcactgcaacctccacctcccaggttcaagtgattctcctgcctcagcctcccgagtagctgggattacaggtatgcaccaccatgcctggctaatttttgtatttttagtagagtcagggtttcaccacgttggccaggctggtcttgaacccctgacctcaggtgatctgcccgcctcggcctcccaaagtgctgggattacagggatgagccacagagcctggcctgctgggattatttcacaccgattttttttttaagatactctcttgttctgtcatccaggctagagcgcagtggtgcaatcatggctcactgcagcctgaatctcctgggctcaagcgatcctcctgtctcagcctcctgggtagctggagctccaggcatgtgtggcaccatgcccagctaattttttaatttttttttgtagagatgcatttttgccatattgtccaggctggtctccaactcctgggcttaagcgatccacccacctcgacctcccaaaatgttggaattacaggtgtgagccactgcacccaacccacgcccatttttaacaaatgaagaaactgaggcttgcagaggttagatcatttgcccaaaatcacatgctggatccagaactagagcccccagtcttgttattctcaacactttttcctccacactacagggacttgatcttaacaccacagacatggcaagctcagagccaaaaatcaatatatgccctatttacttaatccagagtttctcaacctggcactaataacattttgagctggattattctttgtttgggggtgggagggcgctgccccacgcatggtaggaagttgagcagcatccctggcctctacccatagatgtcactagcaccccctcccgcagttctgacaaccaaaaatgtctccagactttgccaaatgtgggggtggagggaactgccccaattgagaaccaccagtttagcccttcctggaagacaggctctgtgctaaccacttttccaggatcacctcataaaaccctcaccacatcaagagatgctatgatgtctatttttgcaactagggaaaatgagggtaggcaaacccagaggctccaggaaagcagcgatcttgtctgtaagctcaccactgcataccagcacctagcacaatgcctagcacgaggtaaattgctcaataaatggaggttggtcgaataagatacaaggaagtcaagcaattgtcctagataagtaattgtccttacatagtacgtggtctgagtctaacacatatagctcagagtccagacttaaatttactccctttcctcacaattagtggtggtcccatgacccaaggtccgggtaccactcaaacaggaatcctgatatccacgtttcctcattctccacagtgctgattcctaggcaattcctcagctcccagttcccacgggcaagctcctggagtccccactcccgcccctagaccccagttgtcgggaatccaagttccacaccctcagcgggtgacccggacgggcccctcattcagaacggaaagtggacttcggtcccgatcccccttcacgggccccgactcccgctgccaagacaggccgtggcgcccgcccccacccccacggctccttacgaagctaagtgtggagcccggaccgcccttcctcttcggatccccggggccagcggcggcggccgactggtcgggtcgctgcggacccgggggcggctcctcctgccgctgccgctgctcctcctccatcttccgcttgaacagctccaggaagctgccgtcgttggcgaacaagttcacgccgcccgacaccgggctcgaacccgcgcccgacacctcctcgtccccgctctcgggcgacgtccccgatcccgactcagcccaacggctcccgccaccgccaccgcccgcggggcccggagcctcccggccctgaggctccgcccgtctccctcgggcagccattttgtcgccaggtgccgcgcaaaggactccgggaaggccgctccggccccgcgcttggcgcccgactcgcctcgtcccgaacaatgcatgccgggaagagcggtcaggccctccagcgcccgcagcgggggcggggcgaatgagggaaccaacccgaaggggcggggctagggggaggagcccccgtctcgcgggtttttttgtttcgttttttttttttctttttttttcagacggagtttccctcttgtttcccaggctggagtgcagtggcgcgatctcggctcaccacaacctccacctcccaggttcaagcgattctcctgcctcagcctcccgagtagctgggattacagacatgcgccaccacgcccagctaattttgtatttttagtagagacgggatttctccatgttggtcaggctggtaatctcccgacctcaggtgatccgcccgcctcggcctcccaaactgctgggattacaggcatgagccaccgcgcctggccttgttttttaaaaattagagacgggcgcctggctatattgcccaggctggtctcgaactcctggcctcaagcgatcctcctgccttggcctcccctcccaaagtgttgggattacaggcgtgagccatcgggcccagtcttgctgttttggtttttggttttttgtcttgttttggagacagagtcacactccgtctccgaggctggagtgcaaaggcatgatcagggctcacttcagcctcgacctctcagggctgaggcgatcctcccaccacagcctcccgagtagctggaaacacaggcatgcgccactacgcctggctaattttatttattcatttatttatttatttatatttgtggagacggggttttgtcatgttgcccaggctgttctcaaactcctaggctccagcagtcctcttacctcagcctcccaaagtgctgggattacaggcgtgagccaccgagccctgcctctcgggttttcaaaattcagcagtactcaggctggagttccccatacaggggctcccggagaatgagactgtcgtctgagactggggctgtagcttgctctctggagttggtttcacttggggctaggaacagattcgctttccagggctagaatccccgtctgacgacaccaagaataatctctatgagtggaaggacctcatctggggctgtgtgctcagctgacacctgggaacttgaatccctaactggggaatagagagcatgtctagtctgggccccccaagtagaaataggggtatctttgggttgggtaaccatctctgggataaagctcacatttgttggggacatagctggctctgtggagctgaagtccccgtctgagaatcagcttacttttttattttattattgttattattactttattttattttgttttattttattttttgagacggagtctctctctgtcgcccaggctggagtgcagtggcgtgatctcggctcactgcaacctccgcctcccgagttcaagcgattcttctgcctcaacctggtctcgattcctgacctcgtgatctgcctgcctcggcctcccaaagtgctgggattacaggcgtgagccaacgcgcccagcctattttatttatttatttagagacggagtttcactctttcacccaggctggagtggagtgaagtggcgcaatctcggctcgctgcaacctctgccctccgggttcaagcgattctcctgcttcagcctcctaagtagctgggattacaggcgcgtgccaccacgcccggctaatttttgtatttttagtagagacaggttttcaccatcttggccaggctggtcccgaactcttgacctcaggtgatccacccgcctcaacctcccaaagtggtaggattacaggcgtgagccaccgcgcccggcccgagaatcagcttattttatgagctgtagtattcagatgaagtcggggttatttctagtctgtagtctccctctaaagttaagagtgtcatgggctggggtctccatcaagggcctggaacccagcttctgttcctgctctaagacagaggttcaaacatgaaatatggtatactggagtcttctcttgaaatacaaggagacttttaggaattccttctacgaaacggagcgcaattgcaggaatggtgtctgctaggcatgggagatcagggcgtacaggacaagactctgtggactcgcccactctaagccactatcagcccggggacctatcgccaaccgagtcaattcgtctatgattggtttgcggcaagagccaagaggctcacagcctattgaataacagagggggcggacctgaggtgaggttgggacctaccgtgaagaatagagggaaaatgatggacataaagttgagcctatggagtcaggccaaggaggaccgggaatctaacttcaccgaaagggcatggactgggtgtttggctggttgctaaggtgaggttggcgctaccggaacataagagtgattggtgtaagtaagaaaagacatagccaatgaaaggagagctgcaagacctagggcccaatcagtgaaagggagtagcctagaccgtaccgatgtgttcattaggtagggggaacccttggaaaattatagaccagaggttgacaaagtgaaccctggaagcaaagaatagtgaaaatataatttatatttctcctaaaaggcaagtaatgaggaaattaactcatgctcctagcttcgctaggaatgtgatagagaatttcccctgtaggttcttcgtatggtgcgctccgctggatcacgtgagccagttccaaaatggcggcaggggtggccgggtggggggttgaggcagaggagttcgaagatgctcctgatgtggagccgctggagcctacacttagcaacatcatcgagcagcgcagcctgaagtggatcttcgtcgggggcaagggtggtgtgggcaagaccacctgcaggtaaggaggctgcggcgggggccaggaggcgtgtaggatataccactgggcgaaggggaggccaaggaccggcttttccaccacgaccggggcatgggggctggcgggggtctttgggtttcactctctggaagttacctggagcaaatgagaaagacctcaatgcagccctagcaccctctgagttggaccatccgtgttggggctcaagtgccgaaccacagtgaactcagcgcccgggggacggggaagcacttagatatccccatcagctggaccgtacctgagtgaatccagagttgtgggtgagggcggcaccagaacaagcaatcctagtttggtgaaccttggtgttttatgcccaaggcgagagtgagggtggaaagcgagggagagagcacgtgatgagactgtcccaggcagctacaggcaggaggtgtccgttggacagattatcctggacaagcagactgaaccatcctgtgcttactagggaatgcaggagaccccttagcttattaaggaagggggcacggagtcaagctatgctggctggaccgctgggccatgccactgtgcccagcaaaaaagaagcaggcactaggccagacagactcagtcagctgaaccttacctctctagtccacatagaggggtcaggagataaatcagagagggttcctttgtagggactgaggctcaatcccaccataacccatactctcctctcaaggcccctgctgattcgggtcacctgctccagggaacctaccactccccttgcagacccagggaacagagcccatcccctcatcccctatcttttgacttttccattactcagctgcagcctggcagtccagctctccaaggggcgtgagagtgttctgatcatctccacagacccagcacacaacatctcagatgcttttgaccagaagttctcaaaggtgcctaccaaggtcaaaggctatgacaacctctttgctatggtgagtggaacagggcttagcccccacttctgggaaaagcctcttccagcctttcttgtgcgcacacaccagcagccaccgtgtcctatccactctatatcctgtgtctctcgtgtttcactccttcctcaacatactcacaagggaaccaatgaggaattgcagagcaggaagcacaccagagtgcctgaagcttagtgagccagggtaggggaaggagaagttggagagaccaatcagagccacatggtgtgggaccttatgggccactaagaagtttggcattgactccaggttattaacgggaagctgtttgttttaagcagggcaatgtcgtggccaaattcatgtttgaaaagtaccctttgacggccaggtggagatttaattgtcagtcagggtagaagcagggaaactaacaaggagattgggggtgtaaccagttgagagatgacaacatcctggactctggtggaggcagaatgttgggggagaagtagtcagacttgaggttttttttttttttagacactcaagactcctctgtctcccaggctggagtgcagtaacccgatctaggctgactgcaacctccgcctcccaggttcaagcaatgctcctgcctcagcctcccgagtagctggcactacaggcttgcgccaccactgcctgttaattttgttttttttaggagacaggttttcaccatattggccaggctggtctcaaactcctgacctcaagtgatctgactgcctcggcctcccacagtgctgggattacaggcatgagccaccacatcgcaccagggatgtattttggaagtaaaccagtaagattacttgggtgagaaaaagaaatgaattgattacatgtctttcttgtctctctgagcagctgggatggggaaaactaggaaaggagtaggtttagaatgaacaaataaagaatttcattttgtccacagtgaatctgagttgcccactggaaatccaagtgtaaacatcatgacagtagcttgtttatgtgagtctggagcccagaggaggttggcattgatttggaagtcactgtctcaagggtggcatttaaagctgtgtgagggctgggcatggtggctcattcctgtaatcctagcactttgagaagccaaggtgggcggatcacttgaggtcaagagtttgagaccagcctggccaacatggtgaaaccccatcactactaaaaatataaaccaattagctgggcatggtggcaggtgcctgtaataccagctactcagaaggctaaggtaggagaatcgctagaacccaggaagcagagattctcctgcctcagcctccggagttgctgggattacaggtgcctaccaccatgcccggctaatttttgtatttttagtagagacgaggttttctcacgtctcaaaaaaaaaaaaaattggctgggcgcagtggctcactcctgtcatcccagcactgtgggagaccgaggcgggtggatcacaaggtcaggagatcaagaccctcctggctaacacggtgaaagcccatctctactaaaaatacaaaaaatagctgggcatggtggcaggcgcctttagtcccagctgctcaggaggctgaggcaggagagtggcgtgaaccccggaggcggagcttgcagtgagctgagatcgcgccactgcactccagcctgggcgacagagcaacactctgtctcaaaaaaataataaaggccgggcacggtggctcacatctgtaatctcagcactttgggaggctgaggcgggcagatcacaaggtcaagagactgagaccatcttggctaacacggtgaaacctcatctctactaaaaatacaaaaaaattagccaggtatggtggcgggcacctgtagtcccagctactccggaggctgaggcaggagaatggcgtgaacgcgggaagtggaccttgcagtgagccgagatcgcgccactgctttacagcctgaacaacggagcgagactcaacaaaaaataataaataaaaataaaataaaataaagagatgctgcagagtgaggatgctggcagaggacagtcctcaggtgggatgagctccatccagcatacagacccagaacttgggcgctgccagggtcagggactgggagggaaacaggaggaattggggcacttcccgggcagagatgagggtgttggcagccaatggcttctctttctcaccaaggaacaggcaagggtctcagcagtgaatgggatagaagtttgaggagggagaaaataccacataaacacttattaaggtagcagggggaaccagaattgtctggatcatcaagtgcccattggagatttgtgttcagaagaggggagcaagggcgggcgtggtggctcatgcctgtaatcccagcacttcgggaggctgaggcaggtggatcagaaggtcaggagttaaagaccagcctagccaagatggtggaactccatctctactaaaaatacaaaaattagctgggcatggtggctcacgcctgtaatcccagcactctgggaggccgaggtgggcggatcacaaagtcaggagattgagaccagcctggctaacagggtgaaaccccatctctactaaaaatacaaaaagttagccgggcgtgatggcgggtgcctttaatcccagttattcgggaggctgaggcaggagaatggcgtgaacgcgggaggtggagcttacagtgagcctagatcgcgccactgcactccagcgtgggtgacagagcaagactccatctcaaaaaaaaaaatacaaaaataagccaggcacggtggctcacgcctgtaatcccagcactttgggaggctgaggcgggcagatcacctgaggtcgggagttcgagaccagcctgaccaatatggtgaaaccccgtctctactaaaaatacaaaaattagccttgcgtggtggccggcacctgtagtcccagttacacgggaggctgaggcaggagaattgcttgaacctgggagacggaggttgcagtgagccgagatcatgccactgcactccagcctgggatacagagcgacactccatctcaaaaaaaaaaaattagttgggcctggtggtgggcgcctgtaatcccagatactcgggaggctgaggcaaagaattgcttgaacctgggaggcggaggtcacagtgagtcgagattgtgccactgtactccaacctggatgacagagcgagactccgtctccaaaagggtgaggagcaagatgggaatactcttcaggagtgttcggccctcaagtgcagtgatactaaagagctagaaagccatacctatcatttcagtgcttgcagagactgagacaagaggatcacgtgaggtcaggagttcaagaccagcctgggcaacaaagggagaccctttctctacaaaaaacaaacaaaattagctgggcatggtggtgtgtgcctatagtcccagtaagttggtaggttgaggcaggaggatcatttgagcctaagagtttgaggctgcaatgagctatgtatgagatggtatcttttttttttttttttttgagactgagtttcactctgtcacccaggctggagtgcagtggtgtgatctcagctcactgcaacctctacctcctgagtttaagcgattctcctgcctcagcctcccaagtagctgtgattacaggcgcccgccaccacatccggctaatttttgttttgggggggttttttttgtttgttttgagacggagtcttattctgtcgcccaggatggagtgcagtggcgcaatctcggttcactgcaacctcttcctcccgatttcaagtgattctcctgcctcagcctcccgagtagctgggactccaggtgcatgccaccatgcccggctaatttttagtatttttagtagagacggggtttcaccatgttaaccaggatggtctcgatctcctgacctcgtgatccacccgccttggcctcccaaagtgctgggattacaggcgtgagccaccgcgcctggcctgtatttttttttagtagagacggggtttcaacatgttggccaggctgttttcaatctcctgacctcaaatgatctgcctggcttggcttcctaatacactgggattacaagtgtgagctaccgcgcccggccaagacgctatctctaaaagaaagaaaaaaaaagctggaagtaaccagagtgggggattttgccaacagcaaggggaaagggagtgtttgcagagggaacctgtggaggctgggctggataagggtgccagccaagaggaacactgacagtttacaggggccaggtgaggggatgaagtagtccaaagaagcttaaaatatatgaagcataagaagagggtgcagtgatgagtgggcaagctccccaacagggaatgacccctaaggccagcgagttgggtacttccccatgggacccatgaagttaccaagaagaggtgacagaggaggaagataaagagggaggcattggccgggcatggtggctcatacctgtaatcccagcattttgggaggctgaggtgggtggatcacctgaggttgggagttgaaaaccagcctgaccaacatagagaagccccgtctctactaaaaatacaaaattagctggggtggtggcgcatgcctgtaatcccagctactcaggaagctgaggcaggagaatcacttgaaccctggaggcggaggttgcagtgagccaagatcacgccattgtccagcctagacaacaagagtgaaactccatctcagaaaaaaaaaaaattacaaaaattagccaggcatggccaggcgtgatggctcgtgcctgtaatcccagcactttgggaggccgaggtgggtggatcacgaggtcaggagatcgccaccatcctggctaacacagtgaaaccccgtctctactaaaaatacaaaaaattagccaggtgtggtggcgggcgcctgtagtcccagctactcactgcactccagcctgggtgacagagcgagactccatctcttttttttttttttttttttttttgagatggagtctcgctctgtcgcccaggctggagtgcagtggcgtgatctcagctcactgcaggctccgccccctggggttcatgccattctcctgcctcagcctcccaagtagctgggactacaggcacccgccacctcgcccggctaattttttgtatttttagtagagacggggtttcaccgtgttagccaggatggtctcgatctcctaacctcaggtgatctgcctgcctcggcctcccaaagtgctgggattacaggcgtgagccaccacgcccggccaagactccatctcaaaaaaaaaaaaaaaaaaaaaaattagccaggcatggtggggcatgcctatagtctcagctactcgggaggctgaggcaggagaattgcttgaacccagaaggtggaggttgtgatgagctgagatcgcgccactgcactccagcctaggcaacaagatcaaaactccatctcgggaaaaaaaaaaaaaaaagagggaggcattgagtctgagactggccagggaccccagccatggccatcccttcatagattctacatacatgtttgtgttttgttttgttgtttgttttttgagacagagtctccctctgtcacccaggctggagtgtaatggcgtgatctcggctcactgtaacctctgcctcccgggttcaagcgattcccctgcctcaacctccagagtagctgggattataggcacccgccactatgcatggctaatttttgtatttttagtagagacggggtttcaccatgttggccaggctggcctcaagctcccgacctcaggtgatctgcccgcctccgcttcccaaagggctggaattacaggcatgaggtaccgcgcctggctggattccccatatgtgctgacgacctctgtgccaggcactgttcatgctaagcgctaaggacacagcagtgaactagatggtaaaacccctgcccctgaggggcagacattcctgctatggagacagatgataaacatgataagggaatcatgagggatgtgaggaagggctaatttttttttcagataggtcttgctatattgcccaggctggtgtccaactcctgggctcaagcgatcctcccatctcattctcctgagtacctgggactacaggcgtgagctatcctgcccagctcctaagggctaaaccttaaggagaaaggaaggcagggcaggggtgtcggtggatctgtgctgttacttagggtggtcagggagtctctcagtggagggatgatgatccggaagaggtcatggcccagtcatgggagtatctggggttgcaagtggcaggttgcaagtggggagtagcagtgtaaatggcccgcagtgggtttcagcttccctttgagggccctgggcacagcttgcaattttccccttgtttttgaccctttatgcaaccatacaaaaccctaagtactacctcagggtccccccagccgtgacctaatgaaatgcctgtggtcacagcccaccacaggctccctctggccctgtgcccgggtaggaaggctccccctggccctgtgcccaggtgggaaggctcccccagcagtagcagcaacctcagtctcatccctttggcccccaggagattgaccccagcctgggcgtggcggagctgcctgacgagttcttcgaggaggacaacatgctgagcatgggcaagaagatgatgcaggaggccatgagcgcatttcccggcatcgatgaggccatgagctatgccgaggtcatgaggtcaggcccagccagcaggggtgggggctgcctggggaaggggaagagcggacacagagggcctgacccctgtctcccctcaggctggtgaagggcatgaacttctcggtggtggtatttgacacggcacccacgggccacaccctgaggctgctcaacttccccaccatcgtggagcggggcctgggccggcttatgcagatcaagaaccagatcagccctttcatctcacaggcaggcggcgggggcccccacctgcaccatccaggcagccgggagtgggagtaggcccgggcccccagaccctcaaatgcgcactaacaattccctttccttcccaccccttctcactctggacttctccctggaggggatgggacggagctgtctttcctcccccacaggcaggactcagtgtccctgcccctgcccgctaaataccctagacagagccagaaagcacattccagaaccaggcaacctgccttcaaaccctctacactcaccatgtgacccaactgctgtgtgacctcaagcaaatcacttcacctctctgggcctcaccttccttgtcttgcaaatggagatcatgagagtgccccatgggttattattattattattcgagacggagtctcgctctgtcacccaggctggagtgcagtggtgcgatcttggctcattgcaacctccacctcgtgggttcaagtgattctcgtgcctctacctcccaagtagctgggactacagacatgtaccaccatgcccagctaatttttgtactttttgtagagatagggttttgccatgttgcccaggctggtcttgaactcctggcctcaagcagtacacccacttcgacctcccagagtgctgggattacaggcatgagccactgtgcccagcccccatgggttattattacgatgacaaccctaaagcccccacagtgctgcacaccaccagcaccacccaccatggtgtatgtgcacgtgtgggtgtgtgcgtgtcccctgtggggacctgtgcctcaggtggtaacactgagcacttactgtgtgccagacactattctcagcacattatatgcttcagctcatctggtacaacagatctgggaggtaaagtttagagatggggaaactgaggctccaggagggtcaagccccttagctatggttccctaaaaatggcaaagctgaggccggccgcagtggctcatgcctgtaatcctaggacttcgcaaggccgaggcaggtggattgcctgaggtcaggagttcaagaccagcctggccaaaatggtgaaaccccaccagtactaaaaatacaaaaattagccgggcatggtggtgcgcgcctgtaatcccagctactcaagaggctgaggcaggagaatcgcttgaacccaggaggcggcggttgcagtgagccaaaatcacgccattgtactccagcctgggcaacagagtgagactccatttcaaaaaaaaaaaaaaaagaaagaaagaaatggaaaagctagtatttgaccaaccccaggaatctgcttatgggcctgagcctttaaccactgggaggtatcaggagtcatccctcgggtgtttagtgaacccccaacccaggaggtcgccgcaggtaagctatgagccctcccacatcccccctgcagatgtgcaacatgctgggcctgggggacatgaacgcagaccagctggcctccaagctggaggagacgctgcccgtcatccgctcagtcagcgaacagttcaaggaccctgtgagtggtggtctggctggcggtgagaggcccgggggctgaggacaggggcagaccccgcccctcactgtcctctctcgtgccctgtaggagcagacaactttcatctgcgtatgcattgctgagttcctgtccctgtatgagacagagaggctgatccaggagctggccaagtgcaagattgacacacacaatataattgtcaaccagctcgtcttccccgaccccgagaagccctgcaagatgtgtgaggcccgtcacaagatccaggccaagtatctggaccaggtgtgcccacccacccagcactggctcagcagaggcacctctgcccctttattctctgatcttttgctccaccatctggccctctgccctctagcctcctgccctttgcccccacatttcagatccttcacccttattccggccatagaggactgtggctggcctggcctaggtccctgtgaccctggagagcagggggtctagcccagtgatctctgaccatagtgatgcagctcccacttatgacaccttaagctcctgccctatattctctccctgactctggaagctttctagctttaccgcttctattgatccacactctgtctctgccttcctgccccctgaccactgccttctaccctctgccctggctgcagatggaggacctgtatgaagacttccacatcgtgaagctgccgctgttaccccatgaggtgcggggggcagacaaggtcaacaccttctcggccctcctcctggagccctacaagccccccagtgcccagtagcacagctgccagccccaaccgctgccatttcacactcaccctccaccctccccaccccctcggggcagagtttgcacaaagtcccccccataatacagggggagccacttgggcaggaggcagggaggggtccattccccctggtggggctggtggggagctgtagttgccccctacctctcccacctcttgctcttcaataaaatgatcttaaactgctgtattgttgacattgggaggtgagggtaagcacctttatgtacagttgcacaggttgtgcactggacagaagtgtcacatctagaggggcccattcacaacagagacctaatagagatgcatgtttattgtggcaactttggaaggagggtgtcttgggtgagagatacctttgtctcattctgtgtgggttaaggtgtccctgttgggcctgtgaagcctggaatggaagacagaggcattttcccacttccttggaggctcagagcgtgggaactgggaggccccttggccagccccaggctggtggggagcagagcagattaggccggcagtgggcccggcactgcctgctgtttggtttgggaattagtgggcgccctggggagaggccaggcctgccagactggggattaacagtctccaccccccaattcctgcccccatgggatggcatcagcccctcccagcaaagggctgcagcaagggggctggttagtgggcagggtgacagaggactccggctggaggggctcctgaagtctcatcctgactccagagcggtctcaggctgtgggcacacaggcctggaaggcacctagtggacccccttatcccctgcccttcgctcctccctctgccactgcctgggctgctattgttgtccccacttgggagactcaggatggggtatgaccttgagagtttacaagttccaagccagagctggctaggggggacagaaagggggttcctgaggacacacgtgagtcggtgttcaggccgggcgcggtggctcacacctgtaatcccagcactttgggaggccgaggtgggtggatcacttgaggccaggagttcaagaccagcctggccaacatggcgaaacctcgtctctacttaaaatacaaaaattagtcgggcatggtgttggggtgcttgtagtcccagctgctccagaggcttaggtgggagaatcgcttgaaccccggaggcagaggttgcagtgagccaagacagggtaagaccctgtctcaaaaaacaaaagtggtgttcaggtccagtcatggtggctcacgcgtgtaatcccagcactttgggaggccgaggcaggtggatcacgaggtcaggagttggaggccagcctccaactactctctactaaaaagacaaaaattagtcaggcgtggtggtgcccacctataatcccagctacttgcgaggctgaggcaggagaatcacttgaacctgggaggcagaggttgcactgagccgagattgcgccattgcactccagcctgggcaataaagtgagactccgtctcaaaaaaaaagtgttcagacccagagtctgggtgtgccagggtgtgtgtgtaaggggaaccccaccaggagcctagacttgtcactccaactccctggggtgtgcacaagcaggtgtgggcctgttggggtggcatgtgtaaacaaacacgatggtacagccggctccgcgccaaactgccaggatccaaatcccagctgtgctacgaacaagatgagatgtgacatcggagcctcagtttccctacttagatagtaagatgaccaacttagcatgcccgtaaggattccatgagatgaaacacgcaaggcgtttataccagcaccagacaggaaaccgcaagaaatgtttgttatttttcgttgtcacaattagtaagcatatcaaatagcccaggaagcctgcccccagcccctgcgggaattcagcagtcggaagtgtgtggggatgcgggtgagctggggtagggaggatgaaaaggaggagcgggcttcagtgaatgcaaggacacttcctagggagtgagggctgctgatcgagaactgagctcatcagcaccgagcctgccaccgccttgccaggttccgcagctgacggcaccgccccagctgccccctcgcccccatttatgggctgtccggcagctggacagcgaaggcatgggtcacagggtgaccagcccaggcgggttcctaattactccgggcagggtgaacatctgccagtctgggaacacggcgtcccagcctgctgggcttggaacctcgggcggggctatgtagaatgcacgaggggctcctgagcactctaggatgcccatcccagggtttgacccctgaacttctgcccctcccacaccaatctgtgtgttaatgttcttcaggctgggcaatggagggggagtgggtactgtttgtaccaggctgggagtgtcccctttagaggtgtgtctgtgaagaatgaacatctgcccagaatccatgccaaatgcaggacaaggttttgtgtccccaagcttgtgtgttcatggcaatgctgagagtatctgagacctgtgggtgtgggtgtgggcctgccgccgggagggagcgttggaaagggggttgccttcacatattggtgtacaaatgctggtgaatttcaccagcggtgatagctaggggacccttgagggaggggtggctgttgtgtgtgtctttgcaagattggtgaacctcaggccccgctctgagcctgggattgtgtgccaccgcactgaggaaagggtttttgcatttggtgtgtgatcatggctgcatctttgcacagggaagatcgggagtaaaacctccttgcagtggagtatgactgtgtgtgtgaaggcattctgaggtctgggtggggtctggcacttggctggttgtgtgggtgtctttgttacatggcgtgatcatgacggaattcagaccgttgggagagccgtgtgtatgaaagaggagagcctagtatgtcagggtccacctgccttatatatgcgtgatggaggcaggaggggtcgaggtaggtgtgtcttgtgtgaccctggaaggttctgtgacagtgtgtactgctcctctgggtaaccatagttatgtgaggctgtctttttgttttttcaatagagatggggatctccctatgttgcccaggctggtctcgaactcctggctcaagtgatcctcccacctaagcctcccaaagtgctaaaattacaagtgtgagccatcgtgcctggctgaggctgtcttaagagcagctagatttgcttctgggactatgatgtgtgtttctgcgtgcatctctgtgacactgtgtgattacaggtgactgtgaagtgacccagcctcactgagcagtgtgtgtgtttctgggactgggaaaaagaccatccctgcctcctcccccaacctctgggttccagatccctaggacctgccagtgagcgactgggaggggaacagggaggggcgagggaggacaaggcggatttctccccccgtaccaggtaacaaacttgtgggactccaaacaaaattctgaagctacagcctagccgagggaggaggaccaggaaagggaggcacgcccactccccagccccacccaacgccaaagccacccgcccattccatccctgtccctgtgggtccttgcaccggccaccttcaacacaggtgagatgagcccaggcttggggaaatagggggccctgagggaagagggaacctgcgggcaggaatgcatccggagtcctcccggggcggggagtggagggcttggaaggctggaggggaacggagagaggaaaggtcaaggcggatccgggaggaaaagggagtggggggagccagggcaattaagcagaaggtgcacaggctggggcaggggggctaggggacctggaggcttagggacagggcttcagagggagtgcagggagcagaatgggtcaagactgggagctggggaagtggagaagggggagccagaaataggggctgagggagagaatttgggagaggtggagccttgagaacctagaaactcaggtgctggggacttgcggaatggggcatgctacaggtggcctctgggtgaaggggatcgggcagagggtgactcgggagctgactgcagggactcaagggtcttggtggtgggggacggcagttaccagagcccacggccaggagtccagggaaggggacagcctgagatgaaggtcagggaggggcactgggggctggactagactgagtaaagctgggaggagaaggcaactcaggcaagggtcaggactgaaggggtggcgggccggaacatgggtggaatccctgtgctcagttatccccgcacctctccacccacacccgcagcccccacccgggccacccactctcccttggccacacctgccgggtgccacgatgaccgtcacctacacagcccgagtggcgaacgcccgcttcggtggcttctcccagctgctgctactgtggcgtgggagcatctacaaactcctgtggcgagagctgctctgcttccttgggttctacatggcgctgagtgctgcctaccggtgaggctgccctgaggtgctcatgttctagcggagggggggcagctattatatatatataatatataaaaattataaaaatatagagatatataagtatatatatctatgttttttaaactgagatggagtctcactctgtcacccaggctggagtgcagtggcataatcttctcttacttccacctctgcctcccgggttcaagcgattctcctgcctcagcctcccgagtagctgggattatgggtgccagccaccatgcctggctaatttttttgtatttttagtagagatggggtttcaccgtgttgaccaggctggtctcaaacttctgacctcaagtgatcctcctgcctcggcctcccaaagtgctgggattacaggtgtgacccatagcacccggctgggggcagctattataaaagaagccagggtgaggggcacagcaagagagatctgaagctggggatggagtcacccttgtgacctgtgacccctcatctctatcccgcagctttgtgctgaccgaagggcagaagcgctacttcgagaagcttgtgatttattgtgaccagtatgccagcctcatccctgtctccttcgtgcttggtgcggtccaaccccaagtcccccgttcccatgtccctgagaaacccatatccattcatgccttttgaggagcccccattcctgcccctctgagatcccccccctcaaatccaaccccgacagcactgcccacccatttttggatccatatcatgaagatgccagatgtggctctacactctgagacctggggtgtcacctggggtcacagtgccccctgaggtgcccccaggagagctccatctcacacacaggacttattcctggtcaccctggggattctcaccagtgtctgttgtgttattaggggggacaaacccctaaccctccagggaccccataggactccatcctctcaattccagcctgggggcatttctctgacaagtcttggacccctagtgaccacaagtgaccctagcctgcccaaggctccctgatgtagaccctgtccccaaccccttcagaagttcctggctcaggggccgggtgtggctactgtgacaagcctgaccagatgtctctgatgtacacccccacaaaccaggcccctctccccttgttttaggtccctatgccttcacagcaagcaacagtctgcccacgtgcccctaacatgggctctgtgcctctatccccatactgggatcccaatgtcacatctgaggtgactcccaagtagccagtgacccaaagggctgctctgcctttttttttttttttttttttttttttttttgagatggagtctcgctctgttgcccaagctggagtgcaatggtgcgatctcagctcactgcaacctccgcctcccgggttcaagtgattcttctgcctcagcctcctgaatagctgagactacaggtgcgccaccatgcccggctaatttttgtatttttagtagagacggagtttcaccatgctggtcaggctggtctcaaactcctgacctcatgatccaccctcctcagcctcccaaggagctgggattacaggcgtgagccaccgcgcccggcaactgtcctttctgacctcagggctggacccccaagttcccagcccaaacgtggtcaggttggccagcacgctcgggtttccctgatgcagaccttacgttgccccctctcccacaacctgggcccccaaacccctggccctggtgtccccactgagcccccattccccgctcccctgcaggcttttatgtgacgctggtggtgaaccgctggtggagccagtacctatgcatgccgctgcccgacgcgctcatgtgcgtggtggcgggcaccgtgcacggacgcgacgaccgcggccgcctctaccggcgcacactcatgcgctacgcagggctctcggccgtgctcatcctgcgctccgtcagcaccgcggtgttcaagcgcttccccaccatagaccacgtggtggaggctggtgagtactcggccagaggcagggcagagaccgggcaaggaccaggtggaggggggcaaggggcgagctatccctgacccctttcctccagggtttatgacccgcgaggagcgcaagaagtttgaaaacctgaactcatcctacaacaagtactgggtgccctgcgtctggttctccaacctggcggcacaggcccgacgcgagggccgcatccgcgacaacagcgcccttaagctgctgctcgaggtgggcccaaccaggaggtcattcatatagaataccagggaaattgtacccctggagctgtgtcaacggcggccctccaagcacccccacgaggccgatttcaaacaccctcaccaggtgcactcttacctccatggggctgattccaatgcccttgaggggcagctcctgggtgcatggtacctcatccaggtgcacactcaccaccaaataccctccctggaacccccaaagcacactcccaattcccaccaggtgaccacccacctccatcccacgtacctacacttaatatccctgtgtgagctcaccattcaggcctcctcatgacctgtatccacccccaggagctgaatgtttttcggggcaaatgtggaatgctctttcactatgactggattagcgtacccctcgtgtacacgcaggtaaccccatcatgcctctttttatattcggtgtcagtggccctgatgcctggtttccaaggggaaaccaagaactagctaagacccccatcataatgatgcctaatcctagccttggaccccaatgacccccctgagccctgccccgccctgcccaggtggtgaccatcgcactgtacagctacttcctggcttgcctcattggtcgccagttcctggacccggctcagggttacaaagaccacgacctagacctgtgtgtgcccatcttcaccctcttgcagttcttcttctacgccggctggctcaaggtaggtgggtgatccaggctggaatttcgtgggtggggcgggcatggggttcccaagtttccacctaactgctccctctcctctcaggtagctgagcagctcatcaaccccttcggagaggacgatgatgactttgagaccaactttctgatcgatagaaacttccaggtgagactcagtttccaggtgagacttccaggtggcgaccatcccggagtgcccaacagggttctggtcccacccctgccaagtcttgccaggtctcaccccaaccatccttccctctgtggtccccacccacccgaaggggtccaccctgtggtcccggcgggttgccctgcccccactttaccctgtgtgtttgcacccgtaggtgtccatgctggcagtggacgagatgtatgatgacctggctgtgctggagaaggacttgtactgggatgcagccgaggctcgcgccccatacacagcggctactgtcttccagctgcggcagccttccttccagggctccacctttgacatcacgtgagccagttgggtgggcagggccgcctggggcagggcttatggctctgcggggcacatctgattgaaaaggttaagtggaatcaattctggagatggggataagagctaaagtctcaggactgtgataacgccagaagctaagataggagtcaggggacaaggtcaaggtctgagactgggccactgactggggacagagctaagggctgaggtcagcgaggatcagaccggtcagtggtgattccaaaggagatgagggctgaggccaggagcactggctcacgcctgtaatcccagtactttgggaggctgaggcaggaggatcctttgagcaagcccaggagttcagaccagcctgggcaacatagtgagacccccgtctctactaaaaataaaaaattagccaagcgtggtggtgcacgcctgtagtcccagctattcaggggctgaggtgggaggattgcttgagtcgaggagttcgaggctgcagtgagccataatgacaccactgcactccagcctgggcaacagagcaagagcctgtctcaaaaaatgaaaataaaggccaggcgcagtggcttatgcctgtaatcccagcactttgggaggccaaggcaggtggatcacttgaggtcaggagttcgagaccagcctggccaacatagtgaaaccctgtctctactaaaaatacaaaattagccgggcttggtggctcacgcctgtaatcccagctaatcgggaggctgaggcaggagaatcacttgaacctgggaggcagaggttgcagtgagccgagattgcgccattgcactccagcctgggccacaagagtaaaactgcatttcaaaacataaaaataggccgggtgcggtggctcacgccaaggtgggcagatcacgaggtcaggggttagagactagcctggccaacatggtgaaaccccatctctactaaaaatacaaaaattagccggtgtggtggcacgcacctgtagtcgcaggtactcaggaggctgagacaggagaatcgcttgaacccgggaggcgaaggttgtggtgagccgagattgcgccactgtactccagcctgggcaacagagcgagactccgtctcaaaataaaataaaataaaataaaaataaaaaaggaaatggggctgagccacgactgaggttgaagatccaagttgaagtgcaaacacagggtgaggccaggctctgggtttaggagctaagatctttggggataagtgggacaaagcggtgggtggagtcagggaaatcagcgcgcctgggaccctgctctgtcaacaagaggcgaggccgcagcgctggcccactgtcggtcccgcaggctggccaaagaagacatgcagttccagcggctggacggcttggatggaccgatgggagaggcgcccggcgacttcctgcagcgcctcctgccggcgggcgcgggcatggtcgcgggaggcccgctgggccggcgcctgtcctttctactccgcaagaacagctgcgtgtcggaggcgtctactggggccagctgctcatgcgcggttgtccccgaaggcgcggccccggagtgcagctgcggggacccgctgctcgaccccggcctgccggagcccgaggccccgccccctgcgggtcccgaaccgcttaccctcatccctgggcctgtcgagcccttcagcatcgtgaccatgcccgggccccggggtccggcgccaccctggctgcccagccctattggcgaggaggaggagaatctggcctgagatcttagagcccagccccctaaggacagggaaccaggtccctgcacggcacccacgcaggtgtcccggtctgcataagcctcgtgtgcctttgtaaagtccacctacacttttgaccagctctcgctgcccgcatgtgtttggcgctgtgctaggggcgggagttcttccagactcttggaccagcccgccctgaccaccagctctacttcccaacccccactgcctgagaggtctctatcagtgtcctgcctgaattctttccttcaagtgaagatgtgactgactacctcctcgagttgtcatgaggatgaaagaatggcattaaagcatttggtatacagtaggtgctcaataaattgctagtgatttttactcaaacgttgttagtctgatttctcctgccagacattatccattgtcctaagtaaaatttgggagttcttgcaggttcttttttttttttttttttttgagacggagtctctctctgttgcccagcctggagtgcaatggtgtgatttctgctcactgcaacctctgcctcccaggcccaagcaattctcctgccttagcctcccaagtatctgggattacaggcacgcaccaccacacccagctaactttttttaatttttagtagagaggggggtttcaccatgttggccaggctggtttcgaactcttgacttcaggtgatccacccacctctgccccccagagtgctgggattacaggcgtgagccaccaagccctgctgcaggtttcttctttcttcttcttccttctcctccttctcgtcttcctcctcctccaccacaaccaccaggcccagcttattctaggtttttttttttcctttgagacagagtctcacttcatcacccaggctggagtgcagtgccacgatcttgggtcactgcaacctccacctccctggttcaagggattcttgtgcctcagtcccccaagtaactggaattacaggtgcgcaccaccacacctggctaattttttgtatttttagtagagacggggtttcacctcttccaggttttatgatggtgccctgcttaattcttcccaaactctgctgtctgaaacacccacatcagtgccctggcattactcattaatgagccagccactgtcccaggatcatgggttcttcttgcctcaagcctctgcattctcaggccctcagggcttcaggttttactaatttaatatcacacggactcctgatgactcctgaatataaaagtccagccaaggcagtgagctctggtcatgccactgcactccagcctgggcaacacagtgagaccctgtctcaaaaaaaaaaaaaaaaagaggcctggtgctgcagtggggctcacacctgtaatcccagctgggaggtggagatgggtggatcatttgaggtcaggagctggagacaggcctggccaacatggtgaaagcccgtctctactaaaaatacaaaaattagccaggcgaggtggtgggcacctataatctcagctactcagaggttgaagcaggagaatcgcttgaacctgagagatggaggttgcagtgagattgtgccactgcactcaagcctgggtggcaacagagtgagaccccatctgaaaaagaaaaaggaagaaaaagaaatccagccaggatcccttctctaactgtagacccagaaagccaactgcctcttggatgcctccttgcagagatgtcacagacacttcaaacataacacacttgaaatccagctcctaatcagccccccaatctgccccaccctgtgtgttagctttgtccttccaggtgataaggccaaaagaagtcatgtggattcctattcccgccacaggccatcacatcaacccagtggccacaccaacccagcagcaaatcttatcagctttgcctttatttttattttatttatttatttgtttttgagacggagtttcgctcttgttgcccaggctggagcgcaatggcgcgatctcggctcactgcaacctccacctcccaggttcaagcaattctcctgcctcagcctcccgagtagctgagattacaggcatgcaccactacgcccggctaattttgtatttttagtagagacggggtttctccatgttggggctggtctcgaactcctgacctcaggtgatccgcccgcctcagcctcccaaagtgctgggattacaggcgtgagccaccgcgcccggccgagatttgcctttatttttattttatttttgagacggaatttaactcttgtcaccaggctggattgcaatggcatgatcttggctcactgcaaccttcgcctcccgggttcaagtgattctcctgcctcagcctcccaggtagcttggattacaggcgcccactacacccagctaatttttgtatttttagtagagacagggtttcaccatgttggccagccaaagtgctgggatcacaggcgtgagccaccgtgccctgccagctttgcctttaaatcgtatctagaatccaaccatttctcactcctccaggaccccagcctggccagagccctcactatcacccacccacccacctggactaccaaccaggtcttcaagctctggccctggcctcctaagcctgtttctcccagagtggccaccagagggcgcctatgaacacccgagccaggtcacatccctcctttgcttagactcttccgtggctcccacagcacttagaataaaagttaaagtattctctgcagcccacaagtccctgaataatctccccaccctcatctgctttctttttctttttctttttttttgagacagagtctcgctgtatcgcccaggctggagtgccagtggagccatctcggctcactgcaagcaagctccgcctcccgggttcacgccattctcctgcctcagcctcccgagtagctgggaccacaggcacccgccaccacgcctggctaatttttttgtatttttatttttatttattattattatttttttgagacggagttttgctcttgttgcccaggctggagtgcaatggcatgatctcagctcaccacaacctccgcctcccagattcatgcgattcttgtgcctcagcctccagagtgactgggattacaggcgtatgccaccacatccggctaattttgtattttttttttagtagagacggcgtttctccatgttggtcaggctggtctcaaacttctgacctcacgtgatccgcccgtctcagcctcccaaagtgctgtgattacaggcgtgagccactgtgcccggccgcatttttttgtatttttagtagtgacgggtttcaccgtgttagccaggatggtctcgatctcctgacctcgtgatctgcctgcctctgcctcccaaactgctgtgattacaggcgtgagccactgcacccggccttctgctttccttttattttttgagatggagtcttgctctatcgcccaggctggagtgcagtgacacaatctcggctcgctgcaacctccgcctcccgggttcattctcctgcctcagcctcccgagtagctgggactacaggcacctgccaccacgcccggctaatttttttgtatttttagtagagacagggtttcaccatgttagccaggatggtctcaatctcctgaccttgtgatccgccagcctcagcctcctaaagtgctgggattacaggcatgagcgtgagccaccacgcccggccttctgctttcttattcactccactccagccactctggtccccttactgtccctccagcacaccaagcgaggtgtcatctcagggcctttgtgcaaactgttctgcctggatcttccccaggtacttacatggcctctccctcacctccttcaggtatctgcttcaataatgtcacttccttggtgaggcctcctttctgggcctttttattctttttttttttcgatggggtctcactcttgttgcccaggctgcagcaagctatgattgttccacagtggtggctcactctggtaactctgggcaccaaggtgagggagataaagtgggccagggtttagcccactgcttttaagaaaagcttagtggccaggcgtggtggctcactcctgtaaccccagcactttaggaggctgaggtgggcggatcatctgaggtcaggagttcaagaacaccctggccaacatggtgaaaccccgtctctactaacaatgcaaaaattagccagtcgtggtggcatgcgcaggtggtcccagctactcaggaggctgaagcaggaaaatcccttgaacccaggaggcagaggctgcagtgagccaagatcgtgccactgcactccagcctgggcgacagagtgagactccatctcaaaaaaaaaaaaaaaaaaaagcaacaacaaccaaaaaacaaaaccaccacacattcacagacacacaaacgtgatcctcacctacctctggttggtgctattggtcactcacattttagtaagaatgcaagccaagcttttctttctttttctttttgagatggagtcttgctctgttgtccaggctggagtgcaatggcatgatctcagctcactacaacctctgtttcccaggttcaagcgattctcccacctcagcctcccgagtagctgggattacaggcatgtaccaccatgccctgctaatttttgtatttttagtagaggaggggttttgccatgttggccaggctggtctcaaactcctgacctcaggtgatccacccgcctcagcctcccaaagtgctggggttacaggcgtgagccaccgtacctggccgctaagcttttcttaaaagcaatgggctaagcctctggcccactttctctccctcaccttggtgcccagagcacagccagggcagattgaacgcctttatttttctcaaatataaaatcagagtctcctgaggcagcacatgaactccagagagagaatcaacaacaagaatcacattgctaaaaagaacaggcctatatctacctcccgccctccctccccaccaatctgggagagggaagagcagagatcatggcctcaaagctctcgagcacctggctgaagcccagtgctgggcgccatgtgagctggaggaagccagggtgggtggagcccaggctggcttgattgtgaggtctgtcagtgcttgtcagtggggcgaaggttcagagatgccaggcgtcccaagggtccacggcgagaattggttgccagccgctgctgtgccaggaatgactgggcatgggcaggcgcccgctcctccccagctcgctgctgcaaggccatgcccttcaggaggaggtgtggttggggtcaggtgagctcacaggacccccccaccaatattctacccatgagatcttagagcccagaccccacacttaccatattataccaggcactgatgagcagcttttcttcctgctcccgctgacttcggcttttctcaaagtccatctgtcaaggaggcaagtgtcaggggcctagatacgttggaggcagcgtaaagggacgaggacacccacctccaggtgtcggatgcggacatcccgttctcggagctgtgtcctcagggaatggagttctggaggtgcccccgcagctggccgctgcttgggttccatggtctgcatgacctacaggttgaggaagtcatagccaggtgactttggccttgaaaccccctgggacatactggggtgtgtgtattcattcattctttcattcattatagagacagagtccccctatgttgcccaggatggtcttgaactcctggcatcaagcaattctcctgccttagcctcccaaagtgttgaggttacaagcatgagccattgtgcccatccagccagtactttatttttactttatttttatttttatttttgtgatggagtctggctctgttgcccagcctggagtgaagtggcgcactctcagctcactgcaacttttgcctcccgggttcaagtgattctcctgcctcagcctcccgagtagctgggattacaggcgcatgttaccaatcccgcctaatttttctatttttcgtagagacggggtttcgccatgttggccaggctgctctcgaactcctgacctcaagggatcagctgcttcagcctcccaaagtgctgggattagcggcgtgagccactgcgcctggctgtgcgtaattttttttttttttttttttttttttgagatggactcttgccctgtcgcctaggctggagcgcagtggcacaatctcagctaactgcaacctccgcctcccgggttcaaatgattttcctgcctcagcctcctgagtagctgggattacaggcacccaccaccatgcccagctaatttttgtatttttagtagagatggggtttcaccatgttggccaggctggtctcaaactcctgacctcatgttccgcctgccttgacctcccaaagtgctgggattacagccatgagccacggcacccagccagctgtgcagtattttaatgtgacaatcagtagcagtggggaatcatgcagaagtctgtcttatggtggggtatgacaggtatgagttgggggcacagatgtgcaagcaggaggtttgactcaataggaggcacaaaaagtaagaagccagggcaggcaacttgtgggaacacccagcgtcctcaccatgcgggccttgtccacgtagcggcggtatcgctcctccatggcccgcaagtccgcgtccttcttctgcaagttatgctgcagctcctcgatccgccgggctgctggcggaagaggtggcccatcagctccacgctgctgggctctgggatctccccaccctctggtcactaggtcctacttactgctgctgtcagtgggtggctccagctcctcaatgtactcccgcttcctctgcaactccagatctgcctcatgaagcttctgcctgtgggccggggatgagcagcagtgggctgacctccgggctggcttctcttttgtcccagtggtagccacagacctccccgccagccagaaatgcccctacatggccacagagccctctctgcctgcccctcatgcctggggctgtgtgccctggtcccaccggctccacagctgtcagagccacaaccctccgcacccttagcaggtatgccccggaacagcccctgctgtccacttcttcccatcccacagctcccaagctggttcagccaccatcttcccttgctagcttcttctactctcaagcactccatccagcagccagggatctttctagaatacaaatctcttcaatagcagacaggtaaaagaaaagaaagcaggccaggcgcggtggctcatgcctgtaatcccagcactttgggaggccaaagcgggtggatcatctggggtcaggagtccgagaccagcctggccaacatagtgaaaccccgtctctactaaaaatataaaaaatcagccaggcatggtggcacatgcctaagaaactccccactaatatcaaatccatgcccccacgaggagttccctctttctgcgacttacaaatgttcctccagcttccttttcagcaaaatggactgggagagagaagaggcaaggtgagtgggggatccagagaggccctaattcttccttcccagggtgagggtagggggtgccatcctgggcccatggtacttacaatggcctgtatggggcatcgggcagcatgggagagagaggagggttacttcggggcacaagggagggccaggctgggaggtggtgggtgacactcacatcttcagtcttgcccccctgctcctgcagggctttctgcaggtcctccacctgggcccgcagctcggatagctgctgctggttcagcctgcgagggtggggggccgcttagtgcctgtgcccacttttggccccctctgtccctgctccgcgcaggtaggtccccaggcgctcaccggtgctgcgtctccaacccgtggcgcgcgcggttggcatcctccaggtggcgctgcagctcctcctgccgctcccggtcggccgcctcctgcctgcacagccgcttgttctccagctgaagccgcaggagcgtctccctgcagacccgggaggagagagcagggccagggtcgagtcacctcgcaggctcgctggggctcagggagagtggagctaggggcgggacagagccctggggaagagcccagccagaccatggggttggagcaccgaggacctactacgggttcaggttcccggcccagggttaaagtggacggagctctaagctgggatagtgggtggggctaggcaggggcggagctacaagagtggattcgaacagctgggatgggactgctggaaagcgggaagcagaaatgggaagaactaggatgggacagtttttcggggtttttttgtttgtttgtttggttagttttggctttttgtttgtttgagatggagtctcgctctgtcgcccaggctggaatacagtggcgcgatctcggctcactgcaacctctgcctcccaggttcaagcgattctcctgccccaacctcccgagtagctgggactacaggtgcgtgccaccacacccggctaattttttgtatttttagtagagacggggtttcaccgtgttagccaggatggtctcgatctcctgaccttgtgatccgctcgccttggcctcccgaagtgctgggattacaggcgtgagccaccgcgcccggtcgtttttcgggtttttaaatcatttttattttgtagagagggccactatgttgcccaagctgctctcaaactcctgggctcaagtgatcctccagcttcggccttccaaagtgctgggacttagaggcatgatccaccgtgcctggcccggggtgggagagttaatcccggcagggcacaggggactgaaactcacagaggttacactaacaggggtggacgctgggggaaaggatcaaagtcagcggggctagggcataggatttttgtgcaggaactggagccaggtgttggacataatttgtgtactaaggatagacccttgagaggcaaagtcatctggtagggctggacagagccaaatcaggagtaagtgggcctaggagcccggctggcacctggagctgagaccaagcaaccggggctagcagaagatgggagggcgggagcggggctgagggcgggccttggcaagcctgggtggggccagagttttgagtgaccccaggatacctgagctccgcaggcaggatctctgcggctaagttatccacgggtgtggaggtgggatccagtgagggatctgaagaatgcgagaaaagtcttcaggtctcttcgcatcccctgtccccgcccctagggtcttcttcccaaggatcatcttttggggcttcaagttcagccaacagtctggcttgacacaagctccatccccggcttgatagagaaccgggagggttggccaagctttttagcctttgctccaccctgagaccctgagcctctctcttcaatttgaccgtgtcacctctttctggtcacctccagcctggcctagctctgtccccaacctagacatgcactgggacacaacctgttctacccaaacagtacaccaggacaggtaagaccccgggatggggcttcatctcaccggcctgggtcaacccccgcggctgcagctgggcgcagcgcagctcctcattggcctcccgcaaggagtcccgctccgccaacagccgctgcagggacagggtacaagacactccacgggtcaggctcggcctcctgggaaatgggctaccccagaattggcagggtggggcttgggcagtggaacctcagcctcacctccttctcctttgtcaccgactcatacttttcctccaggttgcggcattcaaatagccatttctcggccttcatggcctcctcctgccgctggccctgcagttcctgcacctgaacacagagaggggaggaataaggacagcagggctgggagcaggggcaggggctgagtacaaatggtccccgatccaggatgctttgacttattatttttttgactttactatggtgctttcagctgtgtatgtttttgcttgttttttttagagacagggtctccctctgttgccctggctgatctcaaactcctggcctcaagcagtcctcccacttcagcctcccaaagcactgggattacaggtgtgagccgttgcacccagccgactgtgaatgttaatagtaggaacccatacaaccattctgtttttcaattgcaatgaattagtcttcaataaattgcgttatatagtcaacgctttattataaaataggctttatggtagatgattttgccaaactaggctaaggtaagttttctgagcatgtttaaggtaggctaggctaggctgtgatgctcagtaggtaaagtatgttcaatggattttcttttttaaaaaaaatttaaaaatttttattttttgaaaacagatggaatctcgctatcttgaccagggtgttctcgaactgctggcctcaagcgatctcccatctcaacctctcaaagtgctgggattataggcatgagtcaccacgcccagctctctttttctttttctttttttaatatcttttacttttttcttttgagacagtctccctctctcaaccaggctggagtgcagtgatgcgatcttggcttactgcaacttccacctcccaggttcaagctattctcgtgcttcagctttctgggtagctgggattacaggcgcgcgccaccagcccggctaatttttttttttttttttttcgagacggagtcttgctctgtcgcccagcctggagtgcagtagcacgatctcggctcactgcaagctccgcctcccgggttcacaccattctcctgcctcagcctcccgagtagctgggactacaggcgcccaccaccacgcccggctaattttttgtatttttagtagagatggggtttcaccgtgttagccaggatggtctcgatctcctgacctcgggatccacccgcctcggcctcccaaagtgctgggattacaggagtgagccaccacgcccagactaatttttctatttttaagtagagacagggttttgctatgttggccaggatggtctcaaactcctggcctcaagtgatgtggggttacagaaggagttatggggtgcccgccttggcctcccaaagtgctgggattacaggcgcgagccaccgcacccggtctttttcttttgtttgagtcagggtctcaccctgtcacccaggctggaatgcagtgatgcagccacagctcactacaacctcgaaatcctgggctcaagtgatcctcccggctcagcctcccaaagcgctgggataccaggcctggcctttatgcattttaggatattttcaatttaccacgagttttgttacatggttaggtagccccaaggaaatcaagcagcatggtgaagcggcgggcatcaaagaatttagaggagcggtacttaagggaagggaaaggctgggcttactaacccagacagaagagcagcgtgggtggagggaagaggcccggagagcgtggcctacgtacaaataagggaggggatcaggggtgggcggagggctggccaacggtgagagacttgctgccaggggcggggccccggccctaaccccgcccccgccgcacctgccgccgctgcgcctccagctgggcgcgcagggagcccgctcggcgtagctcatcctccagttgtcgcgtgcgctcggcgtggccggcgttgcgttcctccagctgccgcacctgccgccgcagctccctcagctcgcccaagcggcgccggcaactggtcagcgtggcctccagctgcccagcacgctccgaagactgcctaggggagtgggagggaagggggagggctgagagctctgatcaggggtcagctgggatgtggagtggcccttggagcacagggtgttgttcagcctgaggcttttgggttcaaggtgaaggggtcatgaaagttgagggttaggggtcaatcagggcctggagctgttgagagtcattacagcaatggttagcccagggttataatcaggtatcccctggggtggaattgtggggacacagagggtggggttatagggggagtgatggggagcctagagaggtctgagcatctgccaaggataccttggagtcattgggggaggtatgggacaagaggactgcggggtccttagaagtgcaattggggggtgcactagtaccttcgcattacagagatgctataggggcccagtggagccctttgtggttacagaaggcacagtagagtcaaaagggggtgcaaagtaattgcattgtggagtcctagaaggtaccatgggatccaggggcattatgaagcccaaactgtgcagtgggatctgcagagcattgtaggggaggttcttgtgttttggggggccacagggatgctatggggtcttggaagcatactgtgggataaggggggggcagtgtggggtccaggggatatggtggaattcaggatagtgcaatgtggccttgggcgttctgtagggctcagggtggcactgtggagtccagggggcatattgggggttcactgggcacatgaaaattacagagctgctatggcatcagaggggaactctggaaacaggtttaccccccgccccccgtgatggggacccaggaacccaccactcaccgtagttcatccatctcatccttcagggcctgtgcctcctgggccaggctagtcagcgcctggttccggtgctgcagctccgcaacctccctctccagctcggcacagcgcaggcgctcatcctccctgccactctccagcctgggggtgttgggggaagagcacatgagggggctgccctcccccggtcccctggcttgcctggcccagtccccagctgaccacacctgaagttctcctcctgcaactgctccagctgggattgcagcagcagcagcttcttggcagtgagacctggggtaccctcgccttcaggccggcccatccgctcccgcagccctgcattctcttgcgccaggctctgcttctcctctgacaggagcatcagctgcgggcagggcagaaagatgagcttgggcttggagaggggctactcaagtgaccctgccccacctagggccctacctgccgctccagatccagacagcgctgctgtaattcgtccccctcctcagcctcctcacttaggaaatagtacctgcgggactgcagagatgagggggaagaggaactcagggattcaggagaaggacggggggagggaggctgagatctctagaggccaaatggagggggccaagaaaccctcaggattgaaaagagggctggcgccgggtgcagtggctcgcgcctataatcccagcactttgggaggctgaggcgggtgggttacctgagatcaggagttccagaccagcctgcccaacgtggcgaaccccttctctactaaaaacacaaaaattagccgggtgtggtggcgtgtgcctgtagtcctggctactcgggaggctgaggcaggagaatcgcttgaacccgggaggcggaggttgcagtgagccgagatcgtgccactgcactccagcctgggtgacagagtgagactccatctcaaaaaaaaaaaaaaaaaagaaaaagaaaagaaaagaaaacagggctggggttggagactgaaggaagagcgattccagaacactggagacctggtacaggaagtggctagcaccctggaagatgggcgtggcttacaggcttaaggacaagcccctcccccttaggctaccctgagcatctgtaagtggggtctggacctttaacaaggttaagtcacaaggttaatcacagcaaacttatccccaactcccggcctttggatttgctgatccctgtgcctggaacacctttcccccaaatctcttacctggctgtcaaagttgccatacgtctctggtgacagggagtcaggagtgtctttggtcatgagctgaggagtgggaaggggcattgtaatgaactggatatctgaggccagccttcaaagtatctactatccaacctgagaacctctccatcctcccgtcaaggccagttctgcccaataaccccagcccagaggctgccctcctgcctccaacacagagggaagccagatcccttgagcctgctagattgcgacttagagctgggaggagctggcagacacatgagacagagatgtctggccagctgagttccaggcagagtccagaccttaccagggcaggacctgtgcccagttctctctgccctagagatgtcccctctcctgacattttccaattgcacactgagtgcccccacccacctcttggatggcttccatcaccacatgctgaaccgattcttccagcgtcatgattctctggatgtggtctggggatcaaggtgggggaggctgagacccaggggtgaggtggggaggaaggaggatttcctcaggccagccctggggaccccctaagctccccataccctgctttttctcgcaactgatggcacagcccagcaccagctgaagcagcttgccgagctctgccgggtctgagaactctccaatgaggctcacatctgggagatgctcttctgacacaggatgcgccaggacctggggagaagggggtgtcaggggctcatgggcccacccttctcccaactcaaccccctgaatccctttacagttactcacatcctgggagtactctactaggctccgtaagaccatcttcagattgctgacctagggaggaacaaggaactgtggacaagttcagaggcctcccactctgaatctgtaggtcccatcctctctccacctcacttctccttccctgctcatctcatcctattctgtctgcgtgcgccttcctctaggggtgacctgtctggctgtctgccccttttgtctgcctgaccatctttgtttctttttttttttttttttttttttgctttagctttttaagacagggtctggctctgtcacccaggctggagtgcagtggtgcaatcttggctcactgcagcctcgacctcctggggtcaagcaatcctcctatctctgcctcccagtagctgggactacaggcatatgccaccacaatcgactacttttttttatttgtagagaggaggttttgctatgtagcccaggctggtctcaagctcctgagctcaagcaatcctcccacctcagcctctaaaattgctgggattacaggcatgagccactgtgcccggcctgcctgaccatcttccttcatatgtctccagaaccaagtcacttctcaccacctgccccaccatccttcagccctacccatccatctttacctctcacctggattagtgcaccagctgcctctcctcttccacttttgctgcctacattttatttctctccatgcagccagggggagctttataaagcccaagccaggttgcatctttgctctgctaaaaccctgccttgactttccacagcacttaaaaatagaatccacacccccaccatggcctgccaggcccctgatgacctcatctcctacaaatcttgccctcttgctctgttctgccctctctgccattcctccatcacaccaagtttattcccaaatcacggcctttacatctgctattccctatgcctggaacaccgttcccccaaatttcacttggagattaacccatctgatgtaatcagccacctatgccctcattgctctctctcaaagccctgcttttttgttgtcttcacagaactactggcatcaaaagttttttctttttctttttctttttctttttttcttcttcttgagacaagagtctcgctctgttgcccaggctggagtgcaatggctcaatctcagctcactgcatcctccacctcccaggttcaagtgattctcatgtctcagcctcccaagtaactgggattacaggtgcacaccaccccacccagctaatttttgtatttttagtagagatggggtttcaacttgttggccaggctggtcttgaactcctggccccaggtgatccacccactttagcctctcaaagtgttgggattacaggcatgagccactgcgcccagcctggaagttaatttttatggttgtgtatgtgttgcttgtcactagaatgatggctgtgtggggcaggtttttgtctgtgttattccttgctgaatgcccaggcctggcacagggtgagtactccatagatgaatggatgaacaaatggttgatcaccagacatctgtccctcttcctgcccatcacccaggacatgtgcctagctggcccgtccctggtcatctcttcaccagtctgtcctctaatcaggagtccacttgtcaccttcagcttccagttgggacctggatcttccgagatgccctggagccatgcctcgttgaaccaggaggggtctctgggggcgagaaggtgggatgagcagactgggggacacttttgggatcctccccttcagctccactcacatctggttcagcacataggctacggcaaggccgctgctcaggtcctgagggctggcacagggagacggaacgtggaacgtctgtaactgaggggtaaaggaaaggacaaggaaagagttagggcctgggagcgccgaaccgctccccttttgcagacttttccagtcagcgaacctcacatggtggggcgggcgctgctccgccacagcagctctgcgagggactggcttctgctcacctgagaccggagggggcgtggcctcacctcacctctgcccaacaaaccctgcgcgtccaggccagggtggtatcgcgagtcacctgggccccacaggcaccacgtgaccaggccaattcacctgtgtcctcgccccacgtgaaccaaccacagaggggcggggcctcacctgtcctttccacgcagacttgccacgtgacgggggcgggtgctcgggccagagtccaacggtccagcaagtcgacgaccccgcacctcccagccccagcaccaagagactgaccgaaccagggccagggatcccgggcaagaggagcgggcgctcaccttcccctagccccgccccacgacctacccaggtgagcagagacccgcatagctcagctttgtccacgctcatggctcccgatcggattcaatccaggccacggagccccggcgccgcagcagcctccgggtccgccaccagcgagcgcccgcagccccgacctcccgctcggcctagagcgccgccccgccccgcccccctaggcgcaggccccgccccgcccccaagcccaggctccgcctcggaacgtaatctcctccctacgcccgctcttgcctccagccccgccatcttggatccgggcaccgttcgggcgcccgccctgccgctaggggtcagcctggcccagccttgtgcatccgagggtggtcccacctcccatcctcgccctggccctttttggggtgggaggtcctcaagatccttttgagacggaggtgctccaccctgttacacaagcgcattcacgtcttttccctgcaacttaagtaaattctttttttttttttttttttttttgagacggagtctcgctgtcgcccaggctggagtgcagtggcgcaatctcggctcactgcaggctccgccccctggggttcacgccattctcctgcctcagcctcccgagtagctgggactacaggcgcccgccacctcgcccggctaattttttgtatttttagtagagacggggtttcaccgtgttagccaggatggtctcgatctcctgacctcgtgatccgcccgcctcggcctcccaaagtgctgggattacaggcgtgagccaccgcgcccggccttaagtaaattcttgtgtctaaccactttataatcggagccgttgtgcggggaggggcgagccctggcactttctatggactgggagaggggatgctaaaggggttttcccgccggacgcggtggctctcgactgtaatcccagtattttgggaggcctaggagggagaattaatttggatagaagttggagaccagcctctcttcaaaaaatttaaaaattacccaggtagcggtggctcacgcctgtaatcccagcactttgggaggccgaggcgggcggatcacgaggtcaggtgttcgagaccagcctggccaacatggtgaaaccccgtctctactaaaaatactaaaaattagctgggcgtggtggcgcacgcctgatttcagctactcgggaggctgaggcaggagaatcgcttgaaccctggaggcggaggttgcagtcagccgagatcgtaccactgcactccagggggcaacagtgcaagactcctcaaaaaaaaaaaaaaaaaaattagccagacatgttggcgtgtttctgtggtcctagctcctagctctacagaggctgaggtgggaggatagcttgagcccaggaggtcgagactgcagtgagccgtgatagggccactacactccagtctgggtgacagagcaagactctgtctcaaaaaaaaacagtaaaaatttaaaaatagggccgggcgcggcggctcacgtctgtatcccagcactttgggaggcctaggcaggcggatcacgaggtcaggagatcgagaccatcctggctaacacggtgaaaccccttctctactaaaaatacaaaaaattagccgggcatggtggcacgcgcctgtagtcccagctactcgggaggttgaggcaggagaatagcttgaacccaagaggcggaggttgcagtgagccgagatcgcgccactgcactccagcctgggcgacagagtgagactgtctcaaaaaaaataaataaaataaaataaaataaaataaaatgcctggcgcgatggttcacatctgtaatcccagcactttgggaggtcgaggagggaggactgcttgaacccaggagttcgagaacagccctggcaacacagcgagactccgtctctacaaaaataaaataaaaaataaaagtagctgggcgtggtggcacgcgcctattcccagctactccagaggctgaggtgggaggatcgcttgagtccgggaggtcaacgctgcagtgagccgtggtcgcgccactgcactccagcctggacgtcaggggggagaccctgtttcaagaaataaataaatgaatggatcctccctgcattattgactccagcagtagataaggggacacgggtatggtcctaggtcgagaagaggtcagttagacacacatgtcctggctgatggataggcacccttgcccagcctggatccgtcttccacgatattccccccgcgccttgccctccccagatgcgcgcccggcatcacccccacctcagaacccaggatttggctgaagctgccgcgtcgcccgggcccaccagggggcgcggagaccgcagaacgcggcctagggggaagactgtgcgcccgccctgaaaccccggctggggcggtggagcgggggtcaatggaaagtgatgggaattatagttaacaataaattgcagtcaccatgtatggagtgcttactgtatgcagtccttgcgctaagcgatttaaatacatagactattgaatcctccccatgtctccagatggcaagtgctgttttaattccctgctttgccggcgagaaaacagaggttccgagtggaccgggttttgaggggaagggtgaagcccaggctcgcgccctgtgaccccagggtccctctgcaacccctccccggtagacgggcggggtaatgtgcactaattagaggttattagctgtacccagagggaggggcgggctctgcattgggggcgggcccagatcggaggggaggggcgctgctcccacccacccagaagatcctggcgccagagaccttgccccggagcagggtgggcaaagtgacagctgctccccgcgcgcatcgcacgaacgcagtcactcacccccagacacccgattacagcccactcatgcgcagccgtacgcacccgggggcctcggatgctcgtccatatccccacaacctcctcccgcgtggttttccagactccagcccctgggagcgggtggagaggatagtgggggaaggggacaagggccggcagcgctggcttccggactgggctgtcttccggcggtcgtgggaacagctgccgttggctccccgacctcgcattcaccagaggagagggtgctgccaatacagggaaacagggccaccccgttcccaggtagcaatgggaggtgagccaggaaccacagctgttacaagcatgggtggctggacatgctgagatcaccacattagggcgggggtcgcagggattttgatgtttaggggaaatctggaaatccaaatatttaggcaaattgacttaaattgtgctaatgttggcgtgatgttgtgggcgtcccagatgttcggggagccaggagtccccagacttaaggaaaatctgggtgtgctcaatttgggggaggagcataaccctccattttgcggcggcagggagtcccacatttggggaaaagcagtgagcttctatgtcggcggggaagacagcagcaatctctgttttgaaacacagggagccccgctgtgcggagatccaggcacctttaattcagcaagaggggctgaaaaaccctccacattttggaagaaggatccaaacccctgttttaggtaaagagagcccccaacgttttgggggatggtctgaaggccgccatttgtagggacacagagccctggtgtgcaggtctgggccagcagcccccagctggattggggagcccaccccctctactggtttccaggaacagctgggcccagcctaggttgtactgctgggaagcggctgactcaacccctccctgtggccacagctggaccccggcctgccccctccagcgttcacatctgggcagggatccagtcttcatcagggctgagaaggggaccctcagtcccacaactggagaacagtgcccctctgccactcccctggctgaccacagccactgggtggactccatgcatcatcaccatggaggactctggcaggccccctacagcccagatattgacatcctgccaggaactcctagccagtcccccctccctgtgtctgtgtgtgtctgagtccatgtgaaatgtgctaggtttttttgtgtttttgagagaaagggttttgctatgttgcccaggatggtctcgacctcctgacttcaagtaatcctcctgcctctgcctcctaaagtgctgggatttcaggcgtgagccacggcgcctggccaaatgtgctggtctttgtaggtgtgagatggaggatctgtgactgtgtgtacacgggcatgtgtcctgcatccattgtgtcataaggccttcgagtttgtgcaacaggctgtgcctgatttgatgggggggagggctggtttcggggactgggggaggggaaatttgtaacatccttgtcggtaacatccttgtccgtaacatccaggttggggccgggcttggtggctcgcgccagtaatcccagcactttgggaggtcaaggcagacagatcacttgaggtcaggggttcaagaccagcctggccaacatagtgaaaccctgtctctactaataatacaataatcagccaggcgtggtggtgagcgcctgtaatcccagctactcaggaggttgaggcaagagaattgcttgaacctgggaggcagagattgcagtgagccgagaacgcgccattacactctagcctaggtaacaaagcaagactccatctcaaaaacaacaacaaccaaaaaaacccatccagattttagggtgactagggaacctctagtgtgtgcccctgtgtatctctgtatggtccaggcagagtttgggtggggctctctcactccaattgcatcttcatgtgttgtgtgtctgtgtctactatatacgtctatatgggacctcactttgggtctatatctgtgtcattctttttttctttttctttttttgagacggagtctcactctgtcacccaggctggagtgcagtggagcgatctcggttcactgcaagctccgcctcccgggttcacaccattctcctgcctcagcctcccaagtagctgggactacaggcgcccgccaccaggtgtggctaattttttgtatttttagtagagacgaggtttcaccgtgttagccaggatggtctcgatctcctgacctcatgatccgcccacctcggcctcccaaagtgctggattacaggcgtgaaccaccgcgcccggcctttttttttttttttttttttttttttttgagacagagtctcggccgggcacggtggctcacgcctgtaatcccagcactttggaaggccgaggtgggcggatcaggaggtcaggagatcgagaccatcctggctaacacagtgaaaccccgtctctaccaaaaatacaaaaaattagccgggcgtagtggcgggcgcctgtagtcccagctactggggaggctgaggcaggagaatggcgtgaacccgggaggcggagcttgcagtgagcggagatggctccactgcactccagcctgggtgacagagcgagactccgtctcaaaaaataataataataataaatataaaaataaagaaaaagaaggctgggcgcggtggctcacgcaggtaatcccagcactttgggaggccgaggtgggcggatcaggagttcaggagatcgagaccatcctggctaacacggtgaaaccccgtctctactaaaactacaaaaaaattagccgggcatggtggcgggcgcctgtggtcccagctactcgggaggctgaggcaggagaatggcgtgaacccgggaggcagagcttgcagtgagccaagatcatgccactgcactccagcctgggcgacagagcaagactccgtctaaaaaaataaaatataaaaaaaataaataacgaaaaagaaaaagagacagagtctcgctctgtcgcccagtctggaatgcagtggcgccatctcagctcactgcaagctccgcctcccgggttcacgccattctcctgcctcagcctccccagtagctgggaccacaggcgcccgccactacgcctggctaattttttgtatttttagtagagacggggtttcagtgtgttagccaggatggtctcgatctccagacctcctgatccgcccgccttggcctcccaaagtgctgggattacaggcgtaagccatcgcgcccggccgtccacttgacgttttgagtgtccctgtacgtggtcttgtctctgtgactgtatcccatttcgtgccccctatttgtggtaacaggggtcatgcgatggcatgactatcttatgtgtctgtatgtatctctgtgccaccacaatcaccatggaagaagtgtggctgtgtgacaaaacaagccctggtgtgcaaaactgtgtccctccctgttcctgttttttttttttcttttgagacggggtctcctgtgtcgcccaggctggagtgcagtggcacaatcgctgctcagtgcagccttgaattcctggcctcaagtgatcctctcgcctcaacccccacatacctgggactatagacacgactataggcatgcaccaccatgcccagctcattaagaaaaaatatttttgtagagacaggggtcttgctatgttgcccaggctggtcttgaactactggcctcaagcgatcctctggccttggcctctcaaaattctgagattacaggcctgagccactgcgcccgtcctattttgctggatggggttgctttatcaggatgtatctgccacctacctatgtatgaatatggctctgtttgcgtccctatcacaaacgctatgtgactgacgtgcctgtgtgattgtctgcgtctccatccacgtgtgtccgtgttcgctgcgaggctggctggactagaatgggttggtgccaagatgtggcaggtgtatcctgcgtccgtgtgacactgtgggtcggggagtttgtttgtgactttgtgtgtagggggcgggaagtgggagtcaaagtcacagaggacagcaggctgcgcggacgcagtgatgtgcgcagagggcctcccgccccgccgttcccctccgggaggcgccctccccgcgttgcgggggcgcgtgcgtcgtgcgtgacgtgagacacgacgggggtcgctgcgtgcgtggaacccgacgcggtcgtgcgtgcaagcgcggggggtggaagggcgggagctctgcactggctgcgtgcgcgcgtgcgtgggcggtggcgggggctgggcgagcggaggcgcgcagggcaggaccagccccgccccggccgggaccttggggcgccggtgaaacccgggagggggcctccgttaaccccttcctgcccgatccgaaacttgtggcccctcgaccgagcgcccgggggcttccccagcgcctgacgggagggcagtccctgttgggggagggacctttcccatggagctgagaccccccccccagttgccatgggaaccagagcttcccgcgtagccaggcgcgtgtttcctttccccgcccagccatcctgcttttcctccagctgcctagtctactgacaatgcgcttcccgctcgtgatcccgggagaagggggctggggtcagcgtcgcccgggcgtgcgtgactcaggccagcccgggggtcccctggccgcagctggcctcgctcccgcttctccgcccccgtgactcacccctcccggctttccccgcgtgtgactcaggcccctggggagggggctgcggagtctgggacccctacagacagtggggccgagaaccaagttctggggacttcgctctccgcggggaaggcctcccccaccagcgagcatccgagggccagcgactccccttagcaagccagaggcgccccccccaactccgcctctgaattggtagaccccccacccccacccctgcaaacctccgggaacccagcccccaacccctcctcccagcccacaggaagttttggcagagcccgtcgcggcgatgaaacggttaaagccgttttcttattcatttcatccaggggcccattttgactcagagcaagccggcgcccccctcgagcctggcctcctgggggcctgggtgcatactccaccccacatgtaccatttttagagaggggaggatggcgcttggtgagctggctgggggtcttgggtagcatatagagctgggttcaaatcctgtctctgccctcattgctgcctggacctcagtttccccatctgaaaatgagggatcattatgtccagcttgttgggttgttgtggggattaggtgaataatagatgggaaactctgcatccagggttgagcacgggagccagaagagggctcctcctgtttctcaggcctgggtgtcagggtgcccagcagaagcgagtccttgccgggcaggccatgccccacccagacactctaaggccatggggttcatcttgtccaccccctgcccgaggcaggcacccaggaagtgagaggcggggcaggaatgaggcacaacctgttgggcccgtcacctccccgccccccaccctcattccagtgccctgagagggcccccccacgctgcagccccacccccgccgccctggacgcctgggtcctgacccgcgggtggcccgagggaggggacgtcggatggagactgtgtctcgggaacatcctgtggactgctggctggacagacggaggagggtcagcccctcccggggcagggcagacattgactgggggcagagtaaacatggcccagggtgaccagacagggggcgggcggggggctgtaggaatgtacacacagtcaccccgagagagccagtccagacacacaaacccctgtcaccttggccacagagagactgccagccagggacacacagacagggtcagacatacagctgggtaagatgatccagcaatgactgtcacacatggacacagtgacagaccagaccctcaagcaagagacacacaccgtcaaacacatgaacgcatccactggtcaaaaatacgcaggcaggccgtgtgcggcggggataaatcaacccagcacataagcatgatagacacaaacacacagagactgacattcaggtgagaggcacacagcaaggcagacacaatggcgtgtgacacacatggagacaaacacaataggctagaaacataggggcaagacagacacagagtgaactatatgtgagacaagcaggcaacatgtgcatgctgataggagagacagtcactttcagcaccagcaccccgagagccacacgagagatatgcagacacaggcatgcactatcagatcctgacacgcaagagaaggcaacacacacacaccccagatctccaactcagaagatagagacaagacaagagagacaaacctagggacagagatgatgtgttcacagtatggcagagagtccctggcaccctggcccaccactgttgcacacacatcagagatgctcccagggacaccaagccgaagccttagaggtacacaccatctcaccaggaacacacacatgtgggacctggcaacagattgggtagatctgggcagactgacacattcacagacatggtctggccagacagtcacacccagtgcagagaggcacagacaggccacagtgggacattcataaacacatcggcacagaaagaccatgacaaaacctgtttgcacacacacacatgcacacatacaaacggagatcagtaacaggcaacatacagatcagccacagaacacacacatggaaacaagccacagacctcacacacagagaccacacacacacaccaaacacaaaccagccacagacctctttttcacacacacacacacacaccagatcgtatacacacatacatacagaccagccacagacctctttttcacacacacacaaatgcacattacagatcgtatacacacagaccagccacagacctcttttacacacacacaaacagatcatatacacacatacagaccagccacagaccacacacacaaacacacatacacaccgacacaagttagccataggaactttgaaacaacctacacgtacatacatctagaccatgtgcaacccatcctatagagctcacacacacacagagtggaacagaactctacacagataagccctacatagacctttgcatccagggctgggcacagaagcgggcagagggctactcctgtctctcaggcctgggtgtcagggttggaccagcacacactctcacatgcaccctataggccagtcacacgcttgccccctggaccttgccaaggttctgtgggggcactggacaccccagtctgtctctgccccacagagatcctggcacttcctctctccaaacatcacccccacttccctccctctttgcttttgccacttcccctaggaggcctagctcagcagcctctgctcctgctggggtgggggcctgctataaagaggtcacccagggtcttggtgatgcccaggtcccccaaggcttcaccagcagtggcagggatggaagcagcttcctgagaaactcccctcatgcccaaccatgtcagcctggagagagagaaagagagagactctccttcctgcttccaagaaaacctagcagcttcctctccaggagagggggcaaaggacccccaaaccacagaggtgggagagggaggcggctggtaggccaggagttcctgggggagggctcctgccgggcctcagatccacacccaggggcagggacacgggagggaggctgggtgctgtgtgctgcgatttgtgggttctcgccctggcctgcccactggctgactcacaggcagcccccagcccagtttcctagtgagggccccactggtcagtggggccagcagggaggggggtcaccgggctatttataagaaggagaagtccctcgtgccaagaccaaaagccccgaagacacttgtgggtgggggtgggtgaacttcctccttatcctgtgccctaggccccaggccctggggcactggggaagcctgcgcagggacttcttagccaggtgctggtctggagcccagggcctgggcagtacccagctgccagtctggacgctcaggccagttgggggagggggctgttctcccaccctcctcgtggggccggcctggcgccagtggggcggcttgagggggtggtgcccaggccacaagggtgacactggcagaggcctggaaccggctgtaccagcttggctgggcccccgccctccctgtctggcccaatctccaccccgtgctcaaacacccatgcagagtgtttggaggaaccctactcccacatgctggcctgtccacagagacccgtgcccctctgtctgtgccccaccacatttctcccccaattaaaggagaccctcagtggggtgcggtggctcacacctgtaatcccagcactttgggaggcccaggtgggaggatcccttagggccaggacttccagaccagcctaggcaacagaatgagaccctgtctcaataaaatataaaaaaataaaacttagcagttgtggtgtgcttgtagtcccagttactctggaggctgaggcaggaggatcgcttttacccaggagttcagggctgcagcgagctatgattgtgtagctgaactctagcctgagcaacagagtgagatggtcttgttttgttgcccaggctggagtccagtgtcaagatcatggctcatgtgatcctcctgcctcagccttcggagtagctggaactacaggcacaccctcctgacctcagctaatttttaaatttttttgtagagatgggggtcttgctgtgttccccaggctggtctcaaaaatttctgggctagggctgggcgaggtagatcatgcctgtaatcccagcactttgggaggctgaggcgggcagataacttcaggtcaggagttcgagaccggcttggccaacatggtgaaaccccatctctactaaaaatacaaaaaattagcctggcgtggtggcatgcgcctgtaatcccaactattcgggaggctgaggcagaagaatagcttgaacctgggaggtggaggttgtagtgagctgatattgtgccactgcactccaccctgggcgacagagtgatattttgtctcaaaaaaacaaaacaaaacaaacaataaaaaaaaactcctgggctcaagtgatcctccccctcggcctcccaaagtgctgagattatagacgtgagccactgtgtttggccaaagtgaggttctctttaaaaaaacaaaaaaagggccgggcatggtggcccacgcctgtaatctcagtactttgggagactcaggcgggctgatcacaaggtcaggagttcgagaccagcctgaccaatatggtgaaaccccgtctgtactaaaaatacaaaaattagctgggcatggtggcatgcgcctgtaatcccagctactcaggaggctgaggcaggagaatcgcttgaacccaggaggcggaggttgcagtgagccaacatcatgccattgcactccagcctgggcgacagagcaagactccatctcaaaaaacaaacaaacaaacaaacaaacaaaacaccaaaaaaagaggcccttcatgagacggcctgcagctggtactgcatacatgcttctctggttgtcattattcacaacacagtggctaatgctctgaagccagacagcttggattatatctcaactctagtgcttctagctgttggacaccagacaagttccttaatctcctgtggctcagtttctcatctgttacatggggatacaaataacatgcattttgctggattgttggaagcagtcgatgacttattttatgttaaccacttagaagagtgcctagcccacagtaagagccatgtaagtgttggctattaaaataataattattatttctcagcctatctatcttaagtgtttctgagtctcactgtctgcgtgacactaaccttgaacccatttgtctctctgggcatctctccctgccctgcgcccctgcccccatacacccactgttccttgccctcctcctgggatggactctgtctgggatggcctcacctctctctaggactccctctggcatggccagcctcagccctggccagggctgaattactgtggcctcctggcttttgggacctgcaagttagcttcccaaggtgctgccctctggcctgccctgccctgcccaaccccccaacgctgcccgctgcgcccccgcggggcccagccagatgtcagctgcagttattagcctgggcgggagacacaggcctggcagtgtgcctgccagactcacaggcctccggaatctcccttgagcctggggagggggaggggagccattcaagcaaggggaagaagggagggggcatttaggggtcacagggaccctccaaggacgggacgcccccagcttctgctgggaccttcctccagcaaggccactgcactgctggacttccccctgcccccacatagctcagtttctttttcgcctctttcgttttccttctctttcccacacttggtgagatctaggctgccccggaatggctgtttaacccctatcccttagcctctttctaccctaaagaagagagaggctctcttcatcctccagaagacagaggcctgggaagctgagagagagagagagagacaaagagagagagagagagacagagacagagacagagacactaggcttctcacctcttggtctagtgggttcacacactaactgctcggaagtcccaccttaagtctaactggaagcctgaccgtctgcacctcgccgcagcccttcccgggaaggggctctgggttccctcatattctccccttagattttcaggtcttctctgactcggggagggaagctctcagatgacagagctactctagggaaggaggggggctccctctaggtattctggatgatagtaggatgggacctgcagactaaaacgagagtggggcccctgactcacatgagtgagtggggggtgttggggacggagctccagatctcctggcagaagggaagggcaccccacccgagggaggaggcagccgccgttccagcccgcccaggcgccgggggcgcctcgaggcatcggcccgccctctccgcgccccgtcgggccgggggcgaagtccgacccaggcccgcgggcaggcggggacctgccgggctgggttgggccaggccgggcctggcaggacgcagccccaaagcggcggggtggggcggggccgggccaggcggccgtgggggccccgggggcggcggtcggggctggtcgggactagcagtctgggggcccaggcgcgccctgggacctggcagatagtcgggttccccgcttctggctcggggccccaggacagcgctggtcccacctcttcctgtgccctaatatgggcggcggggagagacttcgggggccggcccgcgctcagtcctgcccgcggactcccgcctgttgccatggcgaccaggccccgctcctcggctgcgtcccccgccgtcgggccaatggaacactccccaagccgcctgcctccgcggtcccctgcaggcaccgcgggcggaaccattgcttgaggggagaggatggtggctggaggctgccgcggctgggcgggctccaagcacccgggcctccgcgggggctcgcacgcccaggttcctcttccgaggcgcaggatgcggcgggacccagggcggggcgcacggtcccgtaggatccgagtgacggagacagggccgggctccttcccccggggctgttgccacacttcctgcctctgcgctctttccccagcctgtttctaaggaagggagtggggttgggcgaccgcgccccagccgtcgggctgggtccaggctctaggagccgacacggtgttgggcaaagcccagggtcaataggggagggttttaggatgggggacagagaatacagatgactaagaggttaccatcgagggggagcagcagtcgtggaagatccagcagtcctggtgcgcgggaccctcaaggccccctcctcacatgtcaactgagtaccctcttattgtcttctctgctccgaagatgtgtccggccccttctaactctctccttcatccgggctagcagatgaccccagtggtccccaatttctggcagacatgtctccatcttctacctggcatattttacctgcctcagtgtaccccaggccgcttactagctttctgcatatctagacttcccctaatgcctccttcccgcttacgggagagcctcagactctggactcagctcccatgagctcctggacccctactcatttcttgcaatttaatgggtcatgcagctccacccactcaccccttttgatctctcccctcctccgtcctgtgaaaattccagtcccgcatccttctgagcccgggacccccagtcaattcctgggtcaggtgtctccttaaccctcccgatttacagtgcttaaccctcatttctgctttttggggtctcccaatggattgtcagtcctcctacccctctcgtattctgggtacctcaggggtttcttcgcacatactgggaccctcaccccacttgctgcgtaccaggtcctggtatttgtcccagtggactccagggaaatcatcctcctccctgaaacccctcactcatgtgcctgggccccccagcacctccttccatgcgtaccccgaggtcctttgagcccctccccctgcagccccgccgagccacccggcccgtggccgctgtttacaaggacacgcgcttcctgacagtgacgcgagccgcctcctccccttccccacgctcgaggaggggggcgcgggggcccggctccggcgacggccaatcggagcgcacttccgtggctgactagcgcggtataaaggcgtgtggctcaggctgagcggctgggaccttgagagcggccaggccagcctcggagccagcagggagctgggagctgggggaaacgacgccaggaaagctatcgcgccagagagggcgacgggggctcgggaagcctgacagggcttttgcgcacagctgccggctggctgctacccgcccgcgccagcccccgagaacgcgcgaccaggcacccagtccggtcaccgcagcggagagctcgccgctcgctgcagcgaggcccggagcggccccgcagggaccctccccagaccgcctgggccgcccggatgtgcactaaaatggaacagcccttctaccacgacgactcatacacagctacgggatacggccgggcccctggtggcctctctctacacgactacaaactcctgaaaccgagcctggcggtcaacctggccgacccctaccggagtctcaaagcgcctggggctcgcggacccggcccagagggcggcggtggcggcagctacttttctggtcagggctcggacaccggcgcgtctctcaagctcgcctcttcggagctggaacgcctgattgtccccaacagcaacggcgtgatcacgacgacgcctacacccccgggacagtacttttacccccgcgggggtggcagcggtggaggtgcagggggcgcagggggcggcgtcaccgaggagcaggagggcttcgccgacggctttgtcaaagccctggacgatctgcacaagatgaaccacgtgacaccccccaacgtgtccctgggcgctaccggggggcccccggctgggcccgggggcgtctacgccggcccggagccacctcccgtttacaccaacctcagcagctactccccagcctctgcgtcctcgggaggcgccggggctgccgtcgggaccgggagctcgtacccgacgaccaccatcagctacctcccacacgcgccgcccttcgccggtggccacccggcgcagctgggcttgggccgcggcgcctccaccttcaaggaggaaccgcagaccgtgccggaggcgcgcagccgggacgccacgccgccggtgtcccccatcaacatggaagaccaagagcgcatcaaagtggagcgcaagcggctgcggaaccggctggcggccaccaagtgccggaagcggaagctggagcgcatcgcgcgcctggaggacaaggtgaagacgctcaaggccgagaacgcggggctgtcgagtaccgccggcctcctccgggagcaggtggcccagctcaaacagaaggtcatgacccacgtcagcaacggctgtcagctgctgcttggggtcaagggacacgccttctgaacgtcccctgcccctttacggacaccccctcgcttggacggctgggcacacgcctcccactggggtccagggagcaggcggtgggcacccaccctgggacctaggggcgccgcaaaccacactggactccggccctcctaccctgcgcccagtccttccacctcgacgtttacaagcccccccttccacttttttttgtatgttttttttctgctggaaacagactcgattcatattgaatataatatatttgtgtatttaacagggaggggaagagggggcgatcgcggcggagctggccccgccgcctggtactcaagcccgcggggacattgggaaggggacccccgccccctgccctcccctctctgcaccgtactgtggaaaagaaacacgcacttagtctctaaagagtttattttaagacgtgtttgtgtttgtgtgtgtttgttctttttattgaatctatttaagtaaaaaaaaaattggttctttattaatttctgttgtctttttttccaagctgggagggcggggggaaaaaaaaaagcactggtttgcccccagctcagtgctgttggtggctcggtcctgtatgtgtccccctcgtcggttcggcgcaggcatcttgtggtcccagcccaggagtcccacccttcccgcgtccccagatctccagggttggatggttggggcgcgggacgcggtccagggacccaggagctgaaggcagggtgctccggccgagacttggagtgcgcaggcgcgtccccgcccagccgcgcgcgccggggctttccccgctgacgcagcggaagcgctgcccatacaaggaccgattctgcccagtgacgcgaccgcggtctctgggcagattccgggaatcccctcccccgctctgccgggcagggccgcggcgccgggaagggggccgggattttcccgggcaggcggctgcccgggcacggaaagccccaggcctgggtccagagcgcccgcggtgggcgggcagcgctcctgggctccgggagccacccctgtgccaccttcaagacactggcgcctaggccccgccgcgcccacgccccctccgtctgacctgaccggggcggagggttgctgctgcctccgctgctttgccgacgccgtcccctctacccccaccccctccaggaagggcggcgcccgcctgccagtttcccctcacgggtgccaggccaggagcggggcgactgccaggtctggtcctgccggggcggctgctcgggccgctgggcgccgccaccgccctcgcgctgggctccctcccgcgcagctgggacacgtggaggtgggggtgggggtgctggtgctgctggcccgcctagagggagtctggccggcttcggggttggaagcccccagagcagtggagaaaaacaggtagagaaaccagacaggcagtagggtgagtggaacagacacttcatcaattcatttgtacaatacctagaacaactagaccctggagacacagcctggaccactccagacaagacaataaataaacaagcaaacatggttctttgggggtggtggtaagtgctagtaagaggaaaaaaacaaactaaaacaaacaaaaaaaaaaaacaaaaaaaaaaggtcaaggtggcaatgatggggcagggaggaaagatgctttgcagaatggagtgggaacatggacctttaatagggtgactttttcttttttatattttagagacgggtctttgtcctgttgctcaggttggagcgcagtggtgcaatcatagctaactgcagcctagaccttctgtgctcaagcaagccttccacttcaacttcccaactagctagagctacaggcatacaccactatgcctggctaattttgtttatttttgtagagatggggtctgctatgttgccctggctggtctggaactgctgggtcaaacagtcctcccgccttggcctttcaaagcactgggattccaggcgtgagccagtgctcttctcctgcagtgactttttttttttttttttagacagattcttgctctgtcacccagacttgagtgcagtggtgcgatcttggttcactgcaacctctgcctttcgggttcaagcgattttcctgcctcagcctcccaagtagctaggattataggtgcctgccaccacgccctgctaattttgtatctttagtagagactgggtatcagcacgttggccaggctggtcttgaactcctgacttgaggtcatctgccagcctcggcctccaaaatgctgggattacaggcgtgagccatcgtgcctggccatgacttttcaacagatttgaagaagtggggtcctgagaaaatcctgggtaacaacagcatcagaggtaacagttttttgtttgtttgtttgtgttttttagatggagtctccctctgtcacccaggcaggctggagtgcagtggctcgatctcagtttaccgcaacctccacccacaggattcaagcgattctcctgcttggcctcccaagtagctgggtctacaggcgtgcatcaccatgccaggctaatttttgtatttttagtagaaacagggtttcaccatgttggccaggctggtctcgaacccctgacctcaggtgatccgcctgcctgggcctcccaaagtgctgggattacaggcctgagccaccccgctcaactgggagcagctttttttttttttttttttgagacggagtctcgctctgttgcccaggctagagtgcagtggcacgatctcggctcactgcaagctctgcctcccgggttcacgccattctcctgcctcagcctcccaagtagctgggactacaggcacctgccaacatgcctggctaattttttgtatttttagtagagagggggtttcactgtattagccaggatggtctcgatgtcctgacctcgtgatccgcccgtctcggcctcccaaagtgctgggattacaggcgtgagccactgcgcccggccttgggagcagctcttaaatggcaaaattcatgtagccaggtgagcctgtgaaagaacagcaggaagccagcctgtctggaatggagtgaaccacaacagggcagatgtcaagggagactgagcaggggccttggggaggagtgtagattaaattccaagggagatgagtgacccttagagggtattaggtgggtaccagcattaatagtggatctgtggattaaatgagcatattagccctgttctgtaggaggaaattggggcatagagtagcaaaactactttcctgaacgcacacaatattaaactgcacccctgggaaccctgccttgctgctaatacctgccttctagcctaactgccaccctcccaccccaggggcagacaggcaacctttccagcctggggtggggcagagctcacagcagggactctgcactctgcacgtagctcaggctctcattcttggttctgctcttaagactgggtccccaccctcttccccataagactacactgggctgggttcctttcagctcgaggaagccgtcttaggaactaggaactgggccctacacaggggcctcagccccgagcttcacataacttatctcctacaaattttaccacgtgcatggtgatctgggtttgcagtcccattttactgctgaagagacccagagacgatcacagctcttaaacggcatttgaacccaggctggctggtgacaaaatgtgggctttgccttgcatggccagatttctggatgtagggcatcctgggatttgcaagggacaaacggcataccctacccctccgaaaccgccttgagcgcaagcaggaaaagagcaggcactaagcatgtgataagaccgccaccgtgtggcgaagatgagcaaccacagggtcagtttcccaagcctgagcctgaagaaggaagggggttgcaggggaggacgaaaggacagagcacaccaacacagactcacacctttccctaatactttattggttacctctaggcctgtgtgcggctgggtgggcttgggggagggcgtcactattcagcttctaggtggaggcatgagaaggccttggcctagccctccagggtcccatactgtggagtttggaggggcaggtctggcctttcctgggtcagcatagggcacccaggtgggggcacaggtggacacccagcacaggcacctaggcaggggcacaagctcactatccgttagccagcctaattgtgtttggagaaatattccttgctgtcatccacgttgggcttaatcgtgtcactgccaggcttccagccagcgggacaaactgtgggaagacacaaggatgcacatgaaggctacagccccaggttcaaggtgaagcaaagcaagggcctgtgttgcagaagaaaatgctggaagcaagtggtccaggcccaggaatgtggatattaagataaaccctccaagcccagttcagtattttttcttttttttttttttcagacagagtcttgctctgttgcccaggctgaagtacagtagcatgatctgagctcatgcaacctctccctcctgggttcaagcgattctcatgccccagactccctagctggaattacagaggtgcaccaccacgcctggctaatttttgtatttttggtagagaccatgttagtcacgcttgtctcgaactcctgacctcaagtcatctgcccgtcttggcctcccaaagtgctgggattacaggtgtgagccaccatgcctagccaagttcagtattttctctttttcttttcttcttttttctttctttctttttttttttttttttttgagacagagtcctcctctgttgcccaggctggagtgcaatggcgtgatctcggctcattgcaacctctgcctcccgcgttcaagtgattctcctgccttagcctcctgagtagctgggactacaagtgcccgccaccacaccctgctaattttttggtacttttagcagagacagggtttcaccatattggtcaggctgatctcgaactcctgacttcaggtgatccacccaccttggcctcccaaaatgctaggattacaggcgtgagccactacacctggccaagttcagtattttctagctggtgtttttcctactcttaattcttcaatttctttttgccacccagctctcctttttcttctttttttcttttctttttttttaagatggagtcttgctctgttgcccaggctggagtgcagtggcacgatctctgctcactgcaagctccgcctcccaggttcacgccattctcctacctcagccgccagagtagctgggactacaggcgcccgccaccacgcccgactaatttttttgtatttttagtagagacagggtttcaccgcgttagctaggatggtctcgatctcctgacctcttgatccgcccgcctcagcctcccaaagtggtgggattacaggcatgagccaccgtgcccggcctcttttttttttttattttttgagacggagtttcgcttcactcgttgcccaggctggagtgcaatggcacgatctcagctcactgcaacctccgcctctcagcttcaaacgattctcttgcctcagcctcccaagtagctgggattacaggcatgcaccaccaggctgggctaattttgtatttttagtagagactgggtttctccatgtcggtcaagcttgtctcgaactcccgacctcaggtgatccacccacctaggcctcccaaaatgctgggattacaggtgtgagccactgcatctggcctctttttttttttttttttttttaaccaataccccatctcttaaaaaaaaaaaaaaagagatggggtattgctatgttgcctaggctcgactcaaattcctgggcctaagcaatcttctgcctcactctccagagtaggtggaactacaggcatgagacacagcatctacaggcatgagacacagcatcttcctgtctttttggctcctttagtcccatctttgtccctctgccccacccctacaggtttttttgttgttgttgtttttgagatggagtctcacactggcgcccaggctggagtgcagtggtgtgatctcggcttactgcaacctcctcccgggttcaagggagtctcctgcctcagcctcccaagtagctgggattacaggcacctgccaccgcacccagctaatttttttgtatttttagcagagacgcggtttcactatgttggccaggctggtctcaaactcctgacctcatgatctgcccgcctcggcctcccaaagtgctgggattacaggcgtgagccaccgcgctcggcctgtttgtttgtttttttgagacagggtcttgctgtgtcacccaggctggagtgcagtggtgcgatcacagcttactgcagccttgacctcccaggctcaagtgatcctccagcctcagcctcttgagtagctgggactataggcatgcttcacaaaccaagctaattttttttttttttgagactgagttttgctctgttgcccaagctggagtacaacggtgcgatctcagctcactgcaacctctgcctcctgggttcaagcgaactcctgcctcagtctctcaagtagctgggattacaagtgtgcaccaccacggccagctaattttttgtgttcttcgtagagacggggtttcaccatgttggtcaggctggtctcgaactcctgacctcaggtgatccacctgccacagcttcccaaagtgctggcaatacaaccgtgagccactgagcccggcccctttgtccaccttggttgaatgtcaggcgttatttgtctcctaccacattagaaacatcctgcagacaaagccctgagctgaatcttctttggggccctaacacccatctggacaggtaagaggacaggcagtgaatgtttgcatgagtgacggaggcgctcagtatgtacccatgtgtcatgtgtgtatctgctcaccttccccatgctcgtctgtgtactggaaggcctggaccagccgcagagcctcatccacggagcgtcccacaggcaaatcattaacagtgatctggcgaaggacacccttgccatcgatgataaagaggcccctgaagacatcagggttcccagtgaggagctgatagctcccactgccagagacaaggaagggactaccaaccacccgctgctagccacagggctgggggcagagaagacattgtacaggagtggtcccagcatcacaggaatggggggcagggcgctccctgagccgggctgagggtcccacagtacctgtaggcaatgccctcatctgttttcagcacgccgtaatcctcagacaagcgtctggtcacgtcagcaagcagggggatgttcagggggcccaagcctccctctttccggggggtgttgatcctgggagtaggggagacagagttggggcctcaggatgcctggcacagcagggtcctcaccctgtgggcccaatgtgataagcactggaggccggagataaggggctttagagtaggccgctgggagcctcacccaccccaccctgggttgggtgcaaggactgtatccccatggctgggaagactgagtttgagaggcacagctccagctaagtggcttcacatgtacttgtaacttgcagcatcacccagcagagagcctgtgttaagagtccccatcctcctctagctgtgtcatggggtacagcccttcacttcggtgaactggagtttccatcttcatgaaatagggcagcacagcctccctcctgggaactaagtacatagagtagatagagttgcatctgagttgcatctgcaactctatataccaggcaactagttgtcaaatgctaattactgtcatcatccttaaagacttgggcggcaatgtttccattattttcacgatggggaaacgcaggttccagaggttgagcaatggccacgaagccacactgctaggacctgagggtgtgagcttagctgcaacctccctctttggcccctgctcataccaagccaggtgggtgaactgagagtccaccgagacgcccagcacttcacagcccagcttgcggaagtcctctgcacggttgctgaacgcgatgatctcggtggggcacacaaaagtgaagtccagagggtagaaaaagaggaccacgtacttccctggggaggagggacacagaggagttagggcccagcttctctcatgcacggccccgcttctacctgggccccctccgggcggcgctcacctttgtagtccgacagcttcacctctttgaaggcgccatcaaccaccgctgtggccttgaagtcaggggctggctttccgatgcgcgcgttaccggaggccatgactgaaagctgagacccccgcccggtcagtgcgcccgggaagacactttgtcctcccaacccaaggtcgcgctgcgtgctgggccctatgactgagtcagcacggcggaggcgacagcactaaccctcaccctcccgggtacccggtctacgaggcccggaggctgccggagacccgctctcctgaccagagcacgagtgacccagccactgccaccagcaccccacgagcgagtcggccggagggcggtgtcgcaagcccccagcccagaaggagacagtgaggcccgcacgagcagggggcgggaagtcgggcgatcaggcctgcgctgcaaggctgtggcctcggtttcccccgcaaggacaaaggaggccactatagcggatggaaagcaaaggcggccagcactaaagtcaggatcgggccaaagcagcctgaagggggtcctcccgccaggtgcactccgggtgttcatacctgcgtgggcaaaggctagacgcacggacgatcacacgcgtggacccgcgttctcagcgccaagtgagccctgggccgcgaagccttttatgcccggcccgaaccaagacgtgcacggcgcgggggagggagcggacgagcggagcggtcgggtccactgcgcccgcaggtgcgggggagcgtgcggccgggtccatgcgcctgcgggcggcggggggagacgcgttgccttcggccgggaccactgcacctgcccgcgtgggtaatgcgcccgccgcagactccgcgcacgactccgcctgggagcgcgttgggggccgttggagtccagcatggcgcggaccccgggggcgctgctgctggcgcctctgctactcctgcagctggcgacccctgccctggtctaccaggactatcagtacttagggcagcagggcgaaggtgacagctgggagcagctgaggctgcagcatctaaagggtaacctcaggcggcggggatgacgatgcccaaaggctccccgttgccctacttctcctgctggctgcaaagggaccttcctcggcgggctgcaaatctccacccagctccgcactggaggcgtccccttgggctggttacttttctctaaggctcggtttactcttggatatattgaaatagatactgctttaaagcagctcccaggggaagagagggtgtgggcaggacactgaagctgtcactcggggataggtgccaggaagggcagagacagagaaagaagggggcgggcaagcttgggaaatcagagagggtccgattgcagaagacccgtgaccagtgcagcgagaacgacaagcgaaagtcccatatggaaagatttggggaaagaatgtccaaggaagagggaatagcaaatgccaaggtgaaaagtcctgaaggagaaatggaaagaggtcggtgaggtgtggcagagacatgggtgtgggagggtaggaggtgtcagaccttggtgagcggtgagttgggataagatcggagttgggataagatctgtctcataggggaaaggggcagattcagtaaagagccctttaaagtgatcacagtggccggcgcggtagctcacgcctataatcctagcactttgggaggctgaggtgggaggatcccttggtctcggagaccagaccagcctggcccacacagcaagactccatctctacaaaaaatattttaaaattagcctgacttgatggcccagcactttgggaggccgaggcgggaggactgcttgagcccaggaattcaagaccagcctgggcaacatggagagaccccctactctacaaaaataaataaataaataaaaataaaaaataaattagcctgccatggtggcatgcgcctgtagtcccagctactcaagaggctgatacaggaggaccatttgtgccaaggagtttgaagctgcagtgagccatgattatgcccttgcattccaacctgggtaacagagcaagatcttgtctcaaaataaataaattaaataaataaacaaactgatcataataaattggtttgtatatgctagcacagcaccgggagatttacttaccttcattatgtcaattatgccatttatcacttgacaaccctgctgtcaggtggcattgtgccttctaggtagggccatggtcacacccctgaagacagaagtcagcttcaaatggcgggcaccaaggatgttgtaggacactcacaactgggcaggctggcacagcctggaagtgtcaggttgtagttcctctggcccacttaccccgtatatgagcttggaaggttggcttgctgtctctgggtcttggtttccccacctgagactcgtggaaatattaaatgaggccaggcatggtggctggctcacacctgtaatcccagcactttgggaggctgagatgggagtatcacttgagcccaggagttccagaccagcctgggcaacatggtgaaacaccgtctctgcaaaaaatacaaaaaattagccaggcacagtggcatgtgcctgtagtcccagctacttggtaggccgaggtaggaggattgcttgagcccaggaggttgaggctgcagtgagctgtgactgcgccactgcactccagcctgggcgacagagcgagaccctgtctcaaaaaaaaaaaaaaaaaaaaaaaaaaagcttaaatgagataatctgtggcagggtgtctggcatagaagcagagtctagcgaatatgtgcttctcttattcgttagtatctttatctttctccctctctgggggaggggattgggagtaggccccctccacgtaggtcttcacctctgccctccttctctagaagtcgaggactcaatccttggcccgtggggaaagtggcggtgtctctgcgacctgggcaagcaggagcgcagccgcgaggtagtgggcacagcgccgggcccggttttcatggacccggagaagctgatccagttacggccctgccggcaacgggattgtccatcctgcaagcccttcgactgcgactggaggctctgagcccgggtgagagagcagggccggggcaagttgcggggcccagggtgggcgcggagggaggatgtgcggtgcggggcgggtatgaagcgagtttgaggaagggagaactggggctccaagtcttgagtgacttgaggctgatttggttagggggaagctgagtcaggagccgtgagccccgctgatatctagggagaaaaggagaaaagtggagggggcgccgggcgccggggctcacgcctgtaattccagcattttgggaggccgaggcaggcggatctcttgagtcctggagttcaagattagtctgggcaatatcgttgagatcacctctccataaaaatttttaaaattaggccgggcgcggtggctcacgcccgcaatcccagcactttgggaggccaaggcaggcggatcacaaggtcaggagatcgagaccatcctggctaaaacggtgaaaccccgtctctactaaaaatataaaaaattagctgggcgcggtggcgggcgcctgtagtcccagctactcgggaggctgaggcaggagaatggcatgaacccgggaggcggagcctgcagtgagccgagatcgcgccactgcactccagcctgggcgacagagcgagactctgtctcaaaaaaaaccaaccaaacaaacaaacaaacaaaaacatttaagttagatgagcgtggcggcacatgcctgtggtcccagctactcggtacgatggggaggaaggatcgcttgagcctgggaggcaaaggttacaataagccgagatcgctacactgctatccagcctgggcaacagagtaacatcctgtctcaaaaaaaaaaaaaaaaaaaaaaaaaaaaaaaaagtggagggggaggcgaagaggagtaaaaggagataaagagacaatgaactaggaccctgaggaaggggcatgagcctggtaaggggcgggaacccacaggcagaggacatgagccccagtgagcccagggaatagaagtggtggatgccaggcactgtggctggctcaggcttgtaatcccaacactttgggaggctgaggcgaccggatcgcttgagcccaggagtttgaagccagcctgggcaacataatgagaccccgtctctacaaaaaataccaaaaatagtcgggcatggtggtgtggtgtgcacctgtagtccagctgcttgggagactgaggtgggaggatcgcgtcagcccaggaggtggaggttgcagtgagccaagatcgcgccactgcactccagcctggacaacagagagagaccctgtctaaaaaaaaaagaaggccgggtgcggtggctcacgcctgcaatcccaacactttgggaggccgaggcgggcggatcacaaggtcaggaaatcgagaccaacctggctaacacggtgaaaccccatctctactaaaaagtacaaaaaattagccgggtgtggtggcgggcgcctgtagtcccagctattcgggagactgaggcaggagaatggcgtgaacccgggacgcggagcttgcagtgagcggagatggcgccattgcactccagcctgggcgacaagagcgagactctgtctcaaaaaaaaaaaaaagaaaaaaaaaaagtgggtcgaggggtgggggtggggacattcattctaagttgggaggaatgagcttctatagggagcagagaccctgagcaggagtccaccgaggtctgtgatctccaacgggggtggggaaggcttggcctgaatgagacagaggttaggaagcacagatcttgcacggagtggaggtgggccgaagggagcaaccaagagagggagtttggggactccaaatccaaaagcctgggtttagtggaagcggggctacctggtccaggggacttagaatgtgtacagaagcagggaccgcaagtacagggcctgaatccaagtggcagttggggacccagtgatgcggtgacccgtgtcctgggagtggggtgatatttgactctctagttccccgttaggctgggtcttcgaagctacgtctcagtttccctcttatttccccctcttcccaccgggccacgcaggcggggccccagagaccgtgaagcagagcttgcaaagtgaccccgtccaccgaattccccaagctgagtgttcggccatagcccttcgggactacaattcccaggagggcgcacggcagcgacgtcggcgtcggctgcgtaagcgtccacggcggcgggagcgccaggggcgtgttctgcccgcggattggccggaagcaggcgccgcttcgaggcccgcggaaaacgcgcgccgagacccgctcctgcagtattagttcttgcagctggtggtggcggctgaggcggcatggatctcagcgagctggagagagacaatacaggccgctgtcgcctgagttcgcctgtgcccgcggtgtgccgcaaggagccttgcgtcctgggcgtcgatgaggcgggcaggggccccgtgctgggtgcgcccctagggccagggaggggaggggcgtggtacggaggatgcgggaaacgggagtcgggattgcactgcaccaagggaggggatgtggtcgtggtgatggcacctaaagaagcagtgatgatagaacagggatgaatggcaactttcacgggctcagtgattggaccccggctgccagaaaactgacaccccttctccccaggccccatggtctacgccatctgttattgtcccctgcctcgcctggcagatctggaggcgctgaaagtggcaggtgagcccgaggtgtgcgtctggggaagggattcctgggtatgtgcaggggcaggtgagaactgaaaggggagggcaggaactgggagaaccagctgttccccttctcttccaaacctcctcccagactcaaagaccctattggagagcgagcgggaaaggctgtttgcgaaaatggaggacacggactttgtcggctgggcgctggatgtgctgtctccaaacctcatctctaccagcatgcttgggcggtgaggggtccccgggaggggcagccagcatgggctgaccaagctttgttcctagaatgagattaactgggctctgttccccaccacagggtcaaatacaacctgaactccctgtcacatgatacagccactgggcttatacagtatgcattggaccagggcgtgaacgtcacccaggtgagttaactgtaagttgtccccatttggtcatctcaggataaaatggggacaaaacaggagttcgagactgcagtgagccatgatcatgccacagcactccatcctgggtgacaaaggaagccccccaactcaaaaatggaggcagggcgcagtggctcacgcctataatcgcagcactttgggaagccgcggcgggtagatcaccggaggtcaagagttcgagaccagcctgaccaacatggtgaaaccccgtctctactaaaaatacaaaaattagctggacgtggtggcaggcgcctgtaatcctagctactcaggaggctgagacaggagaatcgcttgaacccaggaggcagaagttgcagtgagccaagattgtgccattgcactccaacccgggcaacagagcaagaccctgtctcaaaaaaataaaaaataaaaaataaactaaaaatgggagaccaggcgcagtggctcacggctgtaatcccagcgtttcaggaggctgaggcaggcagatcacctgaggtcaggagttgaagaccatcctggccaacatggtgaaacctcatctctactgaaaatacaaaaaattagcccagcatggtggcgggtgcctgtaatcccacctattggtgaggccgaggcagaagaattgctcgaacccgggaggcggaggttgcagtgaggtgagatcgcgccattgcactccagcctgggggacagagcgaaaaataaaaataaaaataaaataaaaaataaatgtgggcaaaaatgtgcagtgtgcagattcagcatcagatacgtctggagtgcctcgggcatattcattgctactgttgatttcgtgctcctgtttctgccctaaatgtgtgccacactgacgaccacagtgtagcccctagtcccgtctccatctaatctctccctcatcctaaaggctcagtctccagaacaaatcctacattgtctacctgtcacctctgtcctagcccaggacaccccccactccctggacacctgctgagtgtcgtctctcgtccctcaccctcctatcccctccaatctgttccccaagcagcaacagaaggtagtctttttgaaatgcacatctcgacatttagttttccgatcacagtggaaattaaatcaggaaaattcacagtcgagtggggcagaattacattaaattaccagagaaaaacataaatcagcattgcctcgaatgctctcaatgaaagaatggaccgttctgagagaataacaaggcaaaataaccttgacgtaggaattgtatgctgggtatggtggctcacgcctgtaatcccagcactttgggaagctgaggtgagcaaattggttgaggctaggagttccagaccagcctgggcaacatagcgagactccatctccacaaaaagaagaagaaagaaaggaattatagcaaggtagaccctgctgaggagggacctgaggaccaggcccaaatgcagagctggcgatacagtaactggtgtagacagacaagggccctacccgtaggcgttcagggcctagcctgggcagaaagatggtcagctggaggttgggcgcagtagctcacgcctgtaatcccagcactttgggaggccgaggcgggcggatcatcaggtcaggagttcgagaccagcctgaccaacatggtgaaaccccatctctactaaaaataaaaaataaaaaaataaaacatgaaagatggtcagctggtaaacaaaaaataaaggttgtttctgaaaacagtagtgctgtggagataccactttcccccagcagctcttggaccctctcttcggtgctgcagccaaaggcccccatgcatgggcccagcatcatgaacctggtcccagctcagggcctttgtactggctgttctcacacctagagccctcttccccagatctctgcacagttcacttcctcacctccttcaagcctttattcaccactacacctagctaactttttattttttgtagaaacagggtctccatatgttgcccaggttggtctcaaccacctgccctcaagcgatcctcccacttcggcttcctaaagtgttgggattacaggcttgtgctaacgcactctaccaatttttttctagtgttttctgccacctcagttcctagaacagtatgtggcatgcagtaggtgctaaataagttagagtaaaagcagcgtgatagagaaagcctcttcaggaggtgagttttttctttattttattgtatttattttatgtttttataaagatggggtctcactgtgttgccaagcctggcctcaaactcccaggatcaagcgatcctcccgcctcagcctcccaaagtgctgggatcacaggcctgaacaactttgcctggtctaggaggagatgttcgagttgaaatccctgattgatccatcctggggacgtgctggagaagaggattctgggtagcaggaagaacgtgccagggctgtgaggctagagcattggtacagttgtttgttcaattaatatgtgtctgttgctgtggcaggtattcgtggacaccgtagggatgccagagacataccaggcgcggctgcagcaaagttttcccgggattgaggtgacggtcaaggccaaagcagatgccctctacccggtggttagtgctgccagcatctgtgccaaggtcagtaccctactagccatggctggcttccaccatcccactatataggggccaggcatggccaccaaagggaaggagggagattccaggtgcctgttttgcccacaggtggcccgggaccaggccgtgaagaaatggcagttcgtggagaaactgcaggacttggatactgattatggctcaggctaccccaatggtgagcagacacgtgaccatggtactaatgttgaaatggccagggctgagcacacttctgaggttttctttttttcctttctgtcatttatcattttattttgcttattttttgtttttatttgttatttttgtttattttttgagacggagtttcgctctttttgcccaggctggagtgtaatggtgcgatctcggctcaccgcaacctccacctcctggcttcaagcgattctcctgcctcagcctcgcgagtagctgggattacaggcatgtgccaccacacccagctaattttgtgtttttagtagagactagttttctccatgttggtcaggctggtcttgaactcctgacctcaggtgatctgcctggctcagcctcccaaagtgctgggattacaggcatgagccaccgtgcccagcctattttttgtttttatagagatggggtcttgtcatgttgcccaggctggtctcaaattcctggagtcaagcagtcctcccaccttggtctttcaaagtgctgggattacagccatgagccaccacccctggccctttttttcttctttttttaaagagatggggtctccctatgttgcccagcctggtcttgaattcctgggcttaagtgatcctcctgccttggactcccaaatagctaggattacaggtgtgaactactgtgcctggctggaggttttctaaattgctctggtcaccctactccacagtgaaagaggccaagtgttagacagtggtgccatttgtttatggccacacagccagtgagtgatagagctgaattccaggccataggattgctgctgtcttccccgcttcccactttgctgtctttctggagccccagtgatggactgagacccaaggtgggcatttgtccctttgttaaggggaaggggaccaggcgtggtggctcatgcctgtaatcccagcactttgggaagctgaggtaggagaaccgcttgagtcctcgagttcaagaccagcctgggcaacatagcgagacccccatctctataaaaaatttaaaaaattagccggttatagtggtgcccacctgtagtcccagctactctggaggaggaggctaaggtgggtgggttgcttgagcccaggagttggaggctgcagtgagctatgattatgccactgcactccagccttggtgacaagatgagatcttgtgtcaaaaaaaaaaataatgttagccaggcgtggtggctcacacctgtaatcccaggactttgggaggctgaggcaggtggatcctttgaggtcaggagttctagaccagcctgaccaacgtggtgaaaccccatctctactaaaaatacaaaattagctggacgtggtggcacacgcccgtaatcccagcaactcgggaggctgaggcaggagaattacttaaacctgggaggtggaggttgcagtgagccgagatcgcataattgcactccagcctgggaaatgagcaaaattccatctcaaaataataataataataataataataatatttaatgacaggctgggccaggtggctcatgcccgtaatcctagcattttaagagacagaggcaggtagatcatgtgaactcaggaattcacaaccagcctgggcaatatgacaagaccccatctctacaaaaaatacaaaaattaggtgtggtggtgcgcacctgtagtcccagctacttgggaggctgaggtgagaggatggcttgagcctgggaggcagaggttgcattgagctgtgataatgtcactgcactccagcctgggtaatagagcgagaccctatctcaaaaaaataaaaaggctgggtgtggtgtttacacctgtaatcccagcactttgggaggctgaggtgggtggatcacctgaggtcaggagtttgagaccagcctgcctgtccaatatggtgaaaccccgtctctactaaaaatacaaaaattagccaggtatggtggtgggtggctgtagtcccagctacttgggaggctgaggcaggagaatcgcttgaacctgggaggcggaggttgcagtgagccgagatcgcaccattgcactacagcctgggtgacagagcaagactccatttcaaaaaataagtaaataaaataaaaatgtttaatgacttgttcttggaggtcaaggagatgtctcagaggcagtctccctgcactgcccttttagcagctcttggccaggtaaaggtcctgtggcaagaaggtgcttcagaccataggaggtgccccaggtactcaggaggaagccttagaagagcggcaaggaggccgggcgtggtggctcatgcctgtaatcccagcactttgggaggccgaggggggtagatcacgaggtcaagcaattgagaccatcctggccaacatggtgaaacctcgtcactactaaaaacacaaaatttagctgggcatggtggcatgcgcctgtagtcccagctacttgggaggctgaggcaggagaatcgcttgaatccgggaggtggaggttgcagtgagctgagatcgcgccactgcactccagcctggctacagagtgggactccatctcaaagaaaaaaaaaagagtggcagggagcttgaatgttatggtgcaacttggactgtcaccattgcccaccctaccccagatcccaagacaaaagcgtggttgaaggagcacgtggagcctgtgttcggcttcccccagtttgtccggttcagctggcgcacggcccagaccatcctggagaaagaggcggaagatgttatatggtgggtgtcatggatgtcctgggggtgctatagggaaggaaggagggaggccagcgttcagccctgcctgagagggttgctccctgtgtaagtggtcactgtcatcacctctctcccacagggaggactcagcatccgagaatcaggagggactcaggaagatcacatcctacttcctcaatgaagggtcccaagcccgtccccgttcttcccaccgatatttcctggaacgcggcctggagtcagcaaccagcctctagcagctgcctctacgcgctctacctgcttccccaacccagacattaaaattgtttaaggagaaccacacgtaggggatgtacttttgggacagaagcaaggtgggagtgtgctctgcagccgggtccagctacttccttttggaaccttaaatagaatgggtgttggttgattaattttatttggtttgatttttttcatttttaaattttatttattttattttattttattttatttttttgagagacgaagtctcactctgtcacccaggctggagtagaatggggcaatctcagctcactgcaacctctgccttccaggttcaagcgattctcctgcctcaatttcccaagcagctgggactataggcgtgtgccatgcccaactaatttttttttttttttgagacacagtctcctgttgcccaggctggagtaccatggcacaatcttggctcactgcaacctccacctccctggttcaagcaattcccctgcctcagcctcctgagtagctgggattacaggtgcacaccaccacacccggctaattttcttttcttttctttctttcttttttttttaatttgagacagagtctcactttgtcaccaggctggagtgcagtgatgcaattttggctcactgcaacctctgcctcctgggttcaagcgattctcctgcctcagcctcccacgtagctgtgactacaggcatgcgccaccacactcagctaatttttgtatttttagtagagacggggtttcaccacgttggccagactggtcttaaactgctgacctcaggcaatctgcccgccttggcctctcaaagtgctgggattacaggtgtgagccactgcgcctggcctaatttttgtattttttagtagagacaaggtttcactatatgttagtcaggctgctctctacctcctgacctcaggtgatctgcccacctcagcctctcaaagtgctgggattacaggcatgagccactgcaccgacctttttagttatatttttaatttttaaaaatttttaaattttctttcttgagatggagtctcgctctgtcacccaggctggagtgcattggctcaatcttagctcactgtaacctctgcctcccaggttcaaatgattctcctgcctcagcctcccgagtagctgggactacaggtgcgtgccaccaggcctggctaattttttgtatttttagtagaaacacggtttcaccgtgttagccatgatggtctcaatcttctgaccttgtgatccgtctgcttcagcctcccaaagtgctgggattacaggcgtgagccgccatgcattgcctatttttatttaaaaaattttttgagacagaatctcactctgtcacccaggctggagtgcagtggtgcgatctcagctcagtgtaacctccgcctcctgggtttaagtgattctcccaccttaacctcctgagtagctgaggttccaggcacacgccacgatgcccaactaatttttgtattttttgtagagatgaggtttcatcatgtcgcccaggctggtcttgtagtcctgggttcaagtgatctgcccgctgtgacctctcaatgtgtgagctaccatacctggctgactaatatgtaaaatacatgatgtggctgggcgcaggggctcatacatgtaatcctagtgctttggaaggctgagtcaggaggatcttgaccagtctggacaacatagggtaacaagagcgaaactctgtctcaaaaaaaaaaaaaaaaaaaaaaaaatgctgggctgcatgggggaagataagaaaaaataaagaaaggtcacgaaccaaacaaaaatcttggcgggcagggtgccgtgtggctgcagtcccagcttttctggaggttgaggtaggctccagcatgggcgacagagcaagaccatgtctcaaaaaaaaaagcatatctgcgcattaatgtttggaacaagctgcattctctccagaaggacctagaaggcacagataagcccaccagtgatttggggcaggttgggatggaagcttctcaaatgttctcccttctttctttggttctgtttttgttggttttattttgttttgttttgagacagagtctcgttctgtcacccaggctggagtgcagtggcacagtcttaagtcactgcaacccccacttcccaggttcaagcaattctcccacctcagcctcccgaacagctgggactacaccatgcccagctagtttttgtatttttaatagtgacagggtttcaccatgttggccaggctggtcttgaacccctgacctcaagtgacccgcctgcctcggtctcccaatgtgctgggattataagtgtaagccactgtgcccagtctgtttttgttttctgagacagggtctccgtcacccagaccgaagtgttgccatgtgatcttggctcattgaagcttcgaatgcctgggctcacagggtcctcccacctcagccctgtgagtaagtggaactacaagtatgccaccacgcacagccaatttaaaaaaaatggctgggcgcggtggctcacgcctgtaatcccagcactttgggaggccgaggtgggtggatcacgaggtcaggagatcgagaccatcctggctaacacggtgaaaccccgtctctactaaaaatacaaaaaaattatctgggcgtggtggtgggcgcctgtagtcccagctactttggatgctgaggcagaagaatggcatgaacccgggaggcagagcttgtagtgagccaagatagcgccactgcactgcagcctgagtgacagtgcgagactgagcctcaaaaaaataaataaataaataaaattaaaaaaaatttggtagagacaggatcgccctgttgcccagattggtctctcaaattcctgagctcaagcgatcctcccatctcaccctcccaaagttcttgggattacaggcgtgggccactgcgcctgccctgctctcttttttgagacagagtcttgctttgttgcccaggctggagtgcagtgttgcaatcttgacttactgtgccctcaaactcctgaggtcaagcaaccctcctgcctcggccttcaagtagctagcactgcaggcgtgtatcactatgctcagctaagttttttatttcatagagatggggccttcctatgtgagaggaggcctagcactttgggagtccaacggtatgttgtgttcttgagatgaggtctcactctgtcacccaggctggagtgcaatggcataatcttggcttactgaagcctccacctcccgggctccagcgattctcctgcctcagcctcccaagtagctgggattacagatgcgcacctccatgcccacctcggcctcccaagtgctgggattacaagcgtgagccacacgcccggcccctatacagttttttttttttttttttcttgagatggatgctcattctgtatcccacgtccgacataggaggctgcggcaggagaatcgcttgaacccggctggtggaggttgcagtgagccgagattgcgccactgtactccagcctgggcgatagtcagagactcagtcacaaaaaaaaaaaaaaaaaaatttgggctgggtatggtggctcacgcctgtaatcccaggactttgggcggctgaggcgggcagaacacctgaggtcaggagtttgagatcagcctggccaacatggcaaaaccccgtctctactaaaaatacaaaaattagctggacatggtggcagatgcctgtaatcccagctactcaggaggctgaggcagaaatgcttgaacctgggaggtggaggttgcagtgagccaagatcgtgccattgcgctccaacctgggcaacagagtgagactccgtctcaaagaaaaaaaattttttttatagagatgggggtcttgctatgttgcccagtttgctctcaaactccgggcccaaaggatcctcccaccatagcctcccaaagtgttaaattgttgagattacaggcatgagacacagtgcccggccaagtgtcctaatttcttattgtcattgaattagagctcacaaatatgacctcattttactttaattacccctttaaacacgctctttccaaacacagtcacgttttgacatgctgggggttaggacttgaacatatgaattggaggagacccattcaacccataacagagcatttctccactccacgcaaattctttgtaggacgcagaagccagcactgcaccagccagccagaatcccagaactgtcctttgacagtggaggctagagtgcccaggaatgcatgatgggggacccagctctgatctgggggtctcagagcctgaggaactgactggcagaggtctgcggggtgaatgcggtggaataagtgactggaggatggagggggttccaggcattgggcacgtgttgaggcctagaaatgggagacctggcttcaagaaggcccgagaggccaggcgccgtggctcacgcctgtaatcccagcgctttgggaggccgaggtgggcagatcacgaggtcaagagatggagactatcctggccaacatggtgaaacctcatctctaccaaaaatacaaaaattagctgggtgtggtggtgggtgcctgtagtcccagctactctggaggctgaggcaggagaatcacttaaacatgggaggcgaaggtttcagtgagccaagatcatgccactgcactccagcctggtgacagagcaagactccgtctcaaaaaaaaaaaaaaaaaaagggcccaagaagagggcagtgagagtaggcattcgggaggaggtgtggtctccacccaagagacaccctctatccaaccctcgtcttgttgttattattttgttatttgacttaaaagcttatttttctttttcttttgagatggagactcactcttgctccggctgtgttgcagtggcatctcggctcactgcaacctccgccacatgggttcaagtgagcacatccggctcattttgtatttcttttttttttttttttttttgagactgagtcttgctctatcgcccaggctagagtgcaatggcccaatctcggctcactgcaaccattggctccctggttcaagcgattctcctgccttagactcctgagtagctgggattacaggcaccgaccaccccgcccagctaattttgtttttctctttttttttgagatggaatcttgctttgtctcccaggctgcagtacagtggtgtgatcttggctcactgcaacctccgcctcccgggttcaagaaattcttctgcctcagcctcccaagtagctgggactacagtcacatgccaccatgcctggctaattttttgtatttttaataaagaaggggtttccccatgttagccaggatggtctcaatctcctgacgtcgtgatctgcccgccttggcctcccaaaatgctgggattacaggcgtgagccactgtgccccgccttctttgactttttgtagacaccagggggtgggtcttgaagtcctgagctcaaggggtctcctgccttggcctccccaagtgctaggattataagtaaaagccaccagccaccatgtgcagcctgcaaatgttacttcttttttttttttttctggaatagagcctcactctgtcacccaggctggagtgcagtggtgcgatctcagctcactgcatcctctgcctcctgggttcaagcaattctcctgcctcagctcccgagtagctgggattataggaacctaccaccacaccctgctaatttttgtatttttagtacagacgaagtttcaccaagttggccaggctggtcttgaactcctgacctcaggttatccacccgcctcagcctcccaaagtgctgggattacaggcatgagccaccgcgcccggcctgcaaatgttacttctaacaacagcctttgaatttgtgagaactcagtgctgggtccccgtcccagcagcgtgaagctcacacgggagttggaaagagtccagggttccacactggcctgctgaagatcccgagtgtcatgtttttgaggttttttttaagaaacagagttggctgggtgcggtggctcacgcctgtaatcccagcactttgggaggccaaggcgggtggatcacctgaggccaggagttctagaccagcctggccaacatggtaaaaccccatctctactaaaaatacaaaaattagccaggcctggtggcaggcacctgtaatcccagctactccaggggttgaggcaggagaattgcctgaacccgggaggtggaggttgtagtgagccgagattgcgcctttgcactccagcctgggggacaagagtgagacttcgtctcaaaaaaaaaaaaaaaaaaaaaaaaaggccgggtggctcacacctgtaatcccagcactttgggaggctaaggtgggcggatcacgaggtcaggagattgagaccatcctggctaacatggtgaaaccccatctctactaaaaacacaaaaaattagccagtgtggtggcgggcacctgtagtcccagctactcgggagactgaggcaggagaatggcgtgaacctgggaggcggagcttgcagtgagccgagaatagcgccactgcactccagcctgggctaaagagcaagactccatctcaaaaaaaaaaaaaaaaaaaaagggtctcagccaggcacagtggctcatgcctataatcccagcactttgggaggctaaggtggcggatcacgaggtcaggagttaaagaccagcctggccaacatagtgaaaccgctgtctctactaaaaaatacaaaaatcagctgggcgtggtggtgagcgcctgtagtcccagatacttggggaggtaaggtgggaggatcacttgagcctgggaggttgaggctgcagtgagccgagattgcaccactgcacttaagagcctgaacaacagagtgagaccctgttttaaaaaaacaaaaacaaggctgggcacggtggctcatgactgttattccagcactttggtaggccaaggcaggtggatcacctgaggtcaggaattcaagaccagcctggccaacatggtgaaaccccgtctctactaaaagtacaaaaattagtcaggcatagtggcaggcacctgtaatcccagctagtaaggaggctgaggcaggagaatagcttgaacctgggaggcagaggttgcagtaagccgagatcgtgccacactgcactccagcctgggtgacaagagcgagactccgtctcaaaaaacaaaaacaaaaaacctatggctttcacatgtttccttttctaaatgaggtcctgagtatgtgggactacaggcacaaaccattgcacctcgctaattttttttggtttttgttttttttggtagagatgaggtcttactatgttgcccaggctgattttgaactcctggcttcaagcagttctcctgcttcagccttccaaagtgctgggatttcaggcgtgagctgtcctacctaattttgtccagcctaacttttttttttttttttattttggagatgaggtctggctatggtgcccatgctattcccaatctcctggcctcaagcaatacagtcacctcagcctcccaagtagctgagactgtagcccgaactgccaaaccttgcatcacaccctcctgtctctctcttttttttttttttctgagacacggtctccatctgttgcctcagctggagggcagatgatggctcactgcaacctccacctcctggctcaagtaatcctcccaccttcagcctcccaagtagctgggactacaggtgtgtgccaccatgcccagctaatttttttaatttttagtagagatggggttttgccctgttgcccaggctggtctggaactcctgacctcaaagaattcatctgcctcggcctcctaaagtgctagaattacaggtgtgagccacagctcctggtacatcacactctatcctcaggttcaagtgtctctgcctggcatccagtgtcttccaggaccagatcccatctcccatggtctatcccaggcttcctggtcagctcagagttcccagaatatgaaatctccaggcctttcacttggaatgtcctccatggcttgattatctgactggagatcctttaaagacttgctttacttccttgaatgcttgttcctcctccttgtcacaataacacagtctataacatcagtaacccagtatgtaacatcatccaccagaagcaatcataatagacggtctacattcattgagtgataattgtgtgccacactttctaagcattttatttgacatcccccccattggaggtggagtctatgatgcctctccttgaatatgagctggcttcagtgactcactgtagtgaataaaaagtgagagatgtcacactgtgtgagttccaaggttaagtcatcagaactgaaacagatcccacctggcttgctctcttgggatatttcccttagaccgtagctgccatgttgagaggaagcccaagccacagagaggccatgtgcagatattctggccaacagccccagcagaagttcaaggcaacagccaacaccaactaccagatatgtgagcaaggaagccttcaacgtgattccagccccagccactgtgtctgcaagtatatgacagatcttcaggaagaactgccaagctgaaccaagtcaaaccccagaaccatgaaagatagtaacttttttttttttttttgagatggagtctcgctctgtcacccaggctggagtgtaatggcgtgatctcggctcactgaaacctctgcttcctgggttcaagcaattatcctgcctcagcctcctgagtagctgggattacaggcatgcgccaccacacccggctaattttctgtatttttagtatagatggagtttcaccatgttggttaggctggtctcgaactcctgacctcgtgatccacctgcctcggcctcctaaagtgctggttgttgtttctttttttttgttttgttttttgagacggagtctggctctgttacccaggttggggcgcagtggcatgatctcggctcactgcaacctctgccttatgggttcaagtgattctccagcctcagcctcctgagtagctgggattacaggcacgcaccaccatgcccagctaattttttatttttagtagagacagggtttcaccatgttggccaggctggtcttgaacccctgacctcaggtgatctgcccgcctcggcctcccaacgtgctgggcttacaggcatgagccactgcactcagccgataatgacttttttttctgagatggagtcttgctttgtcgcccaggctggagtgcagtagtgtgatctcagctgactaaaacctctgcctcccaggttcatgccattctcctgcctcagcctcccaagtagctgggactacgggtgcctgccacaatgcccgactaattttttgtatttttagtagagacggggtttcaccatgtcagccaggatggtctcgatatcctggccttgcgatccgcccgccttggactcccaaagtgctgggcttacaggcatgagccaccacgcccagcctagtgacctttttttcatcactatattggaattgtttggtatgcagtgttagataagcagaaaaacttgcactaactcactgaattctcctttctcaatcctgtgaaaggaatgcatttccgttttattttatttattttattgtaatttttctttttgagacaaggtctcaccctgttacccaggctggagtgcagtggtactgtctcaggtcaccacaacctccacctcctgggttcgagtgattatcctaccgcagcctcccaagaaactgggattataggcatgtgccaccacagctggctaatttttttttttttttttttgagacagatccttgctctgtcacccaggctggaatgcaatggcacgttctctgctcactgcaacctccacctcccaggttcaagcgattcttctgcctcagcctcctgagtagctgggattacaggtgcgccccaccatgcctggctaatttttgtattttttagtagagatggggtttctccatgttggtcatgctggtcttgaactcttgatctcgtgatctgcccgccttggcctcccaaagtgctgggattacaggcatgagccatcgcacccggctgcctggctaatttttgtacttttggtagagacggagtttcgccatgttggccaggctggtctcgaactcctggcctcaagtgaatgaaccacctgcctcggcctcccaaagtgctgggattacaggcatgagacaccgtgcctggcccacattcccattttaaagatgaagaaactgaggctcaatctgggcaacgtgtgaaaccgaagttacagcataagtaagtggtagagctgggttgtgaacacaggtggacgctacacggggtcattcccaccaaattctgtagtctgtacatgtataatatggggtcttgggcaggaatggtgacttgtgtctgtaatcccagcactttgggaggccgaggcaggtggatcacctgaggtttcgccaacatggtgaaaccccatctctactaaaaatacaaaaattatccagatgtggtggtgtgtgcctgcaatcccagctactctggaggctgaggcacgagaagcacttgaacccaggaggctgaggttgcagtaagccaagattgcaccactacaattcagcctgggagacaaagctagactctgtctcaaaaaaacaaacaaacaaacaaaaaaaacgccaggcgtggtggctcacacatgtaatcttagtactttgggaggccaaggtgggtggatcccctgaagtgaagagtttgagaccagcctggccaacatggtgaaaccctatctctactaaaaatacaaaaaattagctgggcttggtggcaggtgcctgtaatcccagctactagggaggctgaggcaggagaatcactggaacccgggaggaggaggttgcagtgagctgagatcctgctattgcactccaacctgggcaacaagaacgaaactcagtctcaaaataaataaataaataaaaagctgggatctggcttttgcccaggctggagtgtagtggcaggattatagcttactgtagcctcaatgttctgggatcgagtgatcttcttacctcagcctctcaagtagttgggagtacagcacatactaccagggccagcttggtattctgtgtctgcatgtcttattattattattttttttgagagagaggctctcactgtgtcacccagactagagtacagtggtgtgatcgtggctcactgcagccctgaactgagctcaagcgatcctcctgcctcagcctgctgagcaggtaggaatacaggcacgggtcactacactgggccaattaaaaatattctttttctttttcttttttcttcctttctctctctctctttttttttttgtggagacaggttctcaccgtattgcgaagcctggtcttgaactcctgggctcaagcaatccaaccacctcagcctctcaaattgctgggattacaggcatgagcctctgcacctggccttgaagtgtgtcttgaggcctatacaagttaggcagcttcttggcagccctggtggcacacagtgggaaggaacccctcctgcccttgtcagcccctgttctgaccccctctccatttccaacaactgggtattcccagttatgttgactgctctagggcacaggctatctatcatttacactctagtatgagtcagtcactacttctagggtctgaggattagacgtgagacatccgttactttctggcaattctccttccgacttatttccccaagaagcagccacactcgtcacgtgctctagctggcgactttattcaaaggggagagggaaaagtgagagagttgggtcatttctgggataacctggagaggggtgggtctctggagctccagggaggagggacagacatctcaaaactattacagaaggccgagaggacgaggggtggggttctgggtgtcctgaggggcggggctgggggaagggtcgctcccccaactcagggccacgcgtccgctaggggccgctgccgcttccactgccactcccgctgcccgcagcgtccaggatggaggtgcgagggctgcgggaacgccgggagggagcttcccggccccgtcgtcctggtctgggacgaggtaccgcggagatggagatgttgaagcagtgacgggctccaggagcagccaccggtagggcgtggcccagagccgagcgacaaaggtccgtcccgtctgcgaaggtctaggaaaaagtggagttaaggccctagtgggcggagtccagagacgtggggggcgtggcctcgggaagggaaaaatgtgtaaattccttagggattggggtcagagccggagcgtgcggcctgggagtctatgtgcggaacgtgagtgggggcaggtccttggggagggtgaatgttcttactgggccctagcgggatgaatcagggttggggcagttggggggcgcgcagagaggtctgtatcaaggctggggttttgtagagagtgactgggcttctgggtcctccagggtaaaatgtggatggacccagagcaggaatggtttcttgggaagggcaaatctggacttcgagagcttttggggtcaaagggcacaacccagtaggaggttgggctagggaagggtgggagcagggacctggggagtaccaatccggtctctggggtctagacacggtaagaaagaacttggtgggggccgggggcggtggctcacacctgtaatcccaacactttgggaggccgaggtgggcggatcacctgaggtcaggagttcgaaaccagcctggccaacatggtgaaacgctgactctactaaaaatacaaaaattagctgggcatggtggcatgcgcctgaaatcccagctattcgggaggttgcggcaggagaatcacttgaaccccggaggcggaggttgcatcgagctgagatcgcgccactgcactccagcctgggtgacaagaatgaaactccgtctcagaaataaataaataaataaataaataacttggtggggaggatctcagtctcttcccttcaccttctgccccacgctcacctgtccataggtaaggcagctgggctcacagccccttttttctgagagtgggagccaagtcgggccgcaggtgatatcatcttcgcagttggcgaacctggagatggcgagtggagaggtgggtaaagcctttgtagttacattccagcgcgattctggctcttctagactgtgttcactatatgcccccacctcggatccaggccccgccttttagaaccactcccctgctaactaaccccatctctccagatttcaccctgccccatattctatcagatctttccatactctgggccacgtcacaactggccttgtccctacagacctcagaccattagttacaggccagtccctcatattttcccactctttcgttttccttttatttatttttgagtcagggtcttgctctgtgactcaagctggagtgcagtggcgtaagcatggcttatggcagctttgacctcccaagctggagcaatccttccacctcagtgtctcaagtacctgggactataggtgcgcaccatcatgtccgattaattttttttttttttttttttgagatggagtcctgctctgttacccaggctggagtgcagtggcccaatctctgcttcctgcaacctctgcctcccaggttcaaacaattctcctgcctcagcctcccgagtagctgggattacaggcgcccaccaccacgcctggctcatttttgtgtttttagtagagacggtgtttcaccacgttggccaagcttgtctcaaactcctgacctcaggggatctgcccaccttggcctcccaaagtgctgggattacaagcatgagccactacgtccggcccatgtctaattaatttttaaattttttgttgagactgggtcttgccatgttccccaggctgatcttgaactcctggcctcaaccaatcctcctgccttgacctctcaaacgactgagattacaggcacccacccttttaccttatcttttcaatcaagaggactcactccttaagaaatctcagggcctggctgggcatggtggctcacccctgtaatcccagcacttcgagaggccaaggcaggcggaccacctaggtcaggagtttgagaccagcttggccaacacggtgaaacaccgtctctactaaaaatacaaaatttagccgggcgtggtggcggaagcatgtaatctcagctactagggatgctgaggcgggagaatcacttgaacccaggaggctgaggttgcagtgagctgagatcgtgtcactgcactccagcctgggcgacaagagcaaaactccatctcaaaaaaaaaaaaaagaaaaaaaggccgggcacggtggctcacgcctgtaatcccagcactttgggaggccgaggcgggcggatcacgaggtcaggagtctgagaccagcctgaccaacatagtgaaacctcgtctctactaaaaatacaaaaattagccgggcatggtggtgtgcgcctgtaaccacagctactcaggagggtgaggcaggagaatcgcttgaacccgggaagtggaggttgcagtgagccgagattgcaccactgcactccagcctaggtgacacagtgagactccatctcaaaaaaaaaaagaaagaaagaaaagaaaagaaatcgcagggctatgaaaagccacattgccatatggcaggtatcttaaaagctgggggcttctcatgcctcgcccctatctacctgggctctaaacattaagctgcatctcttaaaccttggccctgttggaggccactcccctttacacagaaggccaagcaaactgcaggctccgccctcttccccgcccaagtcacaacccacgccccttgcccccgcgtctcctaccaggcctggcagagctcctcgcagagcggctgtgcctggcgtacccccaatagccgcaggcggaagcgactgcgaagggcacgttggaggtgttccaggaaggattcgcatctggacgttgggagagatagggtcggatgggtcaggacccgagggagttcctgggcaatgggcaaagtacgcgagaaaacggtggagggtgctgtactcactcagggctcggcactccacagcgttctggatggtttccagggcccgatgtctctgttgtgtccatctctgagggacaacaaggtcctggcaaaggggaaccctgtgagctagggtcttggatattcaggtaaggtttgggaactgaggcctggggatcccctggacaggggagacaacaattacatcaatcctcacaaacccataacttaagacccttcctttggaatgcaaatgcagcttcaagtagtaataatcatttcttgtttataataatcaacttacttgtcatgtgcctggtagtgacacatatacttaatccttttccttttttttttttctttttttcttttgagacagggcctcactctgtcacccaggctggagtgcagtggcgtgatcttggctcactgcaacctccacctcccaggttcaaacaattctcgtgcctaagcctcccaagtagctgggatttcaggcgcatgccacctcgtccagctaatttttgtattattagtagagacaggggtttcaccatgctggccaggctggtctcaaactcctgacctcaaatgatctgcccactgcagcctcccaaagtgctgggattataggcgtgagccaccgagccctgctcatatgcttatatgcttaatcttaacaacagctctgcgaggtatatttgttatttctctctttttgggggtccatgtgagacccagagaggttaaatgacttcctcaggatcacacagctacaaagtggcagagttgggatttgaacccaggcagtctaattcttatccaccattcttcagcactatccgtgcctcccaccttggtggccatgctaggcccctctcataaggaaattctaacattgtcatggcagggtaggtgtgggtttctgggtgttggtggtgaggcagggtctggggtgctcacctgccaggtgcagcttgcctttgcccagatcagctgccagcccatggtgttgctgggacctggcttggagtgggcggctccctccacaggcttctagcaggatccatgccaaggtcagttgcagcacccacgtcaggccgatgggtcgcatgtggaccctgcagtccatgtccacctgagataagagctggcaggcatagggtggggttcagccatccctttctgtgagcttagggtggcacccacccagtgcatacccaagaagcagtgccaggcagagtagggaaagtgcagctgaggaggaggctggggcagtggccaaggacgttcaaatcccaggagaccatcagggcctgcctccaacctaggagcccccctcccatcagaaccatgtcctctatgtcccttcagtgccaccccaaccaagcttagaccacagtggccctcctcccatccagcaggatctcccacctttttagtcttcaagagaccccttcttttctcagaatgaaggggacctccctaggtcttccaatccccctctcctgttcagtaattcctccctctcttctatgcggcctccctcctccctctctcgctccctgccggcccttctctgggtcaccttctctcggcccacaatcggcttaggggccacccagagctggacctttgggaccaaggctggtgtggcagggctcaggttctgtcactggggcccaaagccccgaggcagggacagctagcggtctgtggagacaagactgtccccttcccgcctccccgcattcagcccctcacctgttggctggattggggtctagaggccgctaagacacctcaggatccagtccaggaaactggctgctgaaaggggcgtggcttaatgcaggggcgggacctcccaccgtcctgcccacactccagctgaccaaaggctggccgacttggggctggtgtgtatatatccttgtgtttgtttttatgttcagcttgtggcttaagctctgtatctatatatgtggggagtgtgtgtgtgtgtgtgtgtgtgtatgtgtgtgaggaaggtgtgtttgtgtggcctatagcctgtgtgtgttcccaggcacctgtgtcttttgtttgtgtggctgtgtgtgtgttgagcatgtatgtgtgtttttgttgtatgaggttatgtttatgtgtgtttcttggtggagtggttgtgtgtgtgtgtgtgtgtgtgtgtgtgtgtgtgtgtgtgtatacgttcagaatctgggggaggattgtgtgtcccaagcaatgtgtttgcagttgaataaaacaggatcttaataaatgtgagaaggggaaatgtagcattgggttagtgtccctgcaaaaatgttggaagtcagtggataaaggtttttgaccatgaaggttgaccatgaatgaacaaagaaatgtcatgtgctgagcaggatgtgtttgtgtgcacacattatgtgtccttctgaagtttctgtgaatgtgtgttgcttgtgaacactcctttaactcatccattcattcaacaaacatttattgagcacctactgtgtgctagattctggggatgcagtagtgaacaagacatgaaaatttcagccaggcatggtggttcacacctgtaatcccagcacattgggaagctgaagtagaaggatcgtttgagcccaggagtttgaaaccaggctggccaacgtggtgaaaccccatctctactaaaaataatcaaaaatagctgggcatggtggcacatgcttgtaatctcagcagttcaggaggctgaggcatgaaaatagtttgaacctgggaagcagaggttgcagtgaatcaagattgttccactgcactccagcctgtgcaacagagtgaaactctgtctcaaaaacaaacaaacaaacaaaaactcaaaataaaagacacaaaaatctcaggtttcatagagctgacattctagggggagaatcagatgagaaaaacatccctgcagagggtatgggtgtgtatgtctatgtgttgtgttgggagaataatttgtctgttttagatgataatttgtgtgcaactggacatcccttggttttggaactatgtgactgtgcttccattggttaagtgtttatatgtgttgtttgtgtgtgtttgcattggatgactgtgtgtatgtctgtgtttcctaagtatgtgtttgtatggctgcagatgtgagtttgtgtgtatctgtatttttggatgtttgcgtgtgtctgcatttgctgagtatgtgtttgtatgtgtgttaatttgcagaatgtgtgggtctgtgtttgtggagtatatgtttgcagagtatgttcgaataaatgtttgtgtgtctgtgtttactgaatatgtgactgtgagtgttcgtgtgcctctcatctcagggcaagagaggcttttgtctctcttttattgctgtattccctcccagatcccaaaacactacgttgcacacagtaggtactcaatatgtggtaagtgaacaaatcagtagataccgtctctgggtccctctgtgtacacccagtgatgtgctggaggcctcagtaagcaagacctgccggacctagctttcccctggtccatcttgaggtggtccaggatgcttgtgggtcagatttgttcagcctctgggctatgcctcacgccagagcctccgcaccctttctccttccctaatctcagcccccgaccctgcgcttggatttcagcaccgcggacaggagcgcgcgagaccagcaccaaggagagctcccgcggtcgccatcgtgagataggtcgccaggggcggagtccgggccatggacggagagatgtgccagcaagggactcagcgagacggcgacacaaatgtgccgacaaacatatacagagacagacagagataacccaggcaaaggcgcggacttgaggcgacaagctcctggtgaatacccggacccagcctcgccgtcgcccccgtcgtccagcaggggtcgctgttacccagcgaccgcgccctccgggaccttggggccagatactggccaccaccccttgggaagcccttctgtcccccagtgccaagactgggagttcggagggctcggacactctcctctccaactttgggaagcatggtgggtttggcctcacctgtgtgaacatggaggagcggcgagggagctgaaaagcgctttaactgcccccctctccaactaccagctaatcgctcctataaatacagacggcctggcctggctccttaatcctgaccgtgagggaggggtcgctagaggggctgcagggttccctgaggaggctctgattgtggggcaggtgggtgggggggcataatatgtatgcacatgtttttctgaggttgcgtctcctgtgaagacgggtctcctcagtgaaaatgtttctctgtaagcatgagatctctcctggggctgtagaggtctcgtgggtggggacagtttcccacagaggatatggcttttaggggtctctgattgggggtatcctttacacgggaattgttactcctgggatctttctcttcggggaatgcctctttcgtggggagggggatggcttttgagaggaaagtcacctctcagggaccatatctattaggaatgattttcagggttgggggagttcttgattggacagggcgtccctgtggaaactatctccccctgggaatgtgtctcaccaagggggtctctgggggatgaatgtagagggaatgtatctcagggagaaggcttcctttggggtgtttcttgactgagggttctacccctgagaatatctctcctctggggtgtctctttttatagtggtctctcggcagcttggctcccatgggggcaccaggaggctccgcccccccgcccgccccttccccccgccagcgcgggcagcggtggctgagcccgggctcgggcgcccagacgcagtgacggcgccgggcccgccccacttcgctccgcccccgcccccgccacccctcccctcagccgccgccgccgccgccgccgcggtccccgcggcttctcactccctccctcctccctcctcccgccgccgctacctccctcctccctccccgggccgaagtcgccgccgctgccgccatggacgattcgggcctcatccgccgccggaggctgcaggtacgcggctgcctgggccccgggtggagaggaaggggtcggcgccctggggcggggctgggcaggaggcgggagaacttgcactagggtcagccgggacgcccccacccataggttcgggacgctaaccgcggggaacgctgtggccgcgcgtcccgccgcgctggggaccccgcccctcaggcgccgcccggcgatccagggagctgccggaggggtgcagcctagcgctccccctcgaggatcgcctgaggggcgcctggcccgccctagggggatggggctggggccgaagtcatcgccctggcgcctcgccaggctaggggtgagggggcgcagagcaaagttattgccctagggctcatgcccctcggggccatcggcgccgctggaggcgtaaacatgtttgtgcggcaacctcgcccctcaccaccccaggagccccctcccgaggcataggacgccctgcgtcccccacgcacctgcctggccatcaggattcttcctactgccctaattggacaggcacctagacagctttctcactcttcattccacctcctccactacaacatccgcccccccaccgcgatcctcaagtccagcccagcttgtgggtgggcgggagcgatttttagctccttgcagccttagaagatgctggtctcgaggctgcgcaggcgcaggagccgtgcgtccactgcacggagtgggacactgaggatcgctgtggagtgtggggaaggcggggacaaactcaggtgtcaggagctcctacctccaaggtggggagggattctgtagccgagaagcgtcctctgctcgtcttcagctgcgtttctgaggggttagtacggaagttcagggttaatacggaggtccggtcccaaacatcccagaggggaaggtgatgatatctgtgccccaaggccctgcctggggtctggcccttctgagcctccttggggctcagccccaggcttggtaatctggagtttagataaagccgagaatgggcccagactcaggctccatccccagcctgaatcttgggaaaagaggattcaaaccctcacctagggcttcgtccatttctagactcccctaatccatcattcccgaggttgaaggccaaggggagctgattggtcagtgcagcaggaaaaatggtgatcagactgcaggaaggaccttccaggcgtctgggtaacgccggagccagacatgagttggaaaactaatttgctttcagagcccagatggcccgatctccggagcctaggcctctctgaagtgctcccacattctctccgcctctcgggggtgggttaggagagtgggttccgagagaagggaggcagctgcggcaaagttagagcaagtactgcagcagccaggttgggtccgcgccgtcgggtttctgagaaaagggaggaaagaggcggggcctgcacggtgtgtccccgccctccaggccggcgtcaactctcattggctcagcgccacgcgggactttaaactcccgctcgagacaccgcccccaacgcggaatgcttccactcacccacccacccactcaaccccaggcttgctctgggtccggcgatccctgtcggagtcctgtccccaccgcttcccttctggcgggattaaccacttcgctgcctggatacacccacatacgttggtgcatcctcttaggaactgtcgcatcactgctgagcgcccgagggtcccctgtgtgcagctaggctcttttttttttttttttttttgaaacggagtctcgctctgttgcccaggctggagtgcagtgacgcaatctcggctcactgcaacctccgcctcccgggtttaagagattcttctgcctcagcctcgctagtagctgggattacaggctcatgccaacatgcccggctagttttgtatttttagtagagagtgggtttcaccatgttggccagcctggtcttgaacttctgacctcaggtgatccacccgcctcggcctcccaaagcgctggaattacaggcgtgagccaccacgccctgggatcttatatgtagacagcatcctgagttcgaatgccctgtctgcagtgtcaactattaatcctgtgcgggagaagcggaatccacttggccgagcggctctgcagctgagattggaggtggcgtctgtttacactgacgccaaagacccgaacttccgccgctccagtttgaccctttcttcgtccctagaatgtttgggggcgctagcgggtggggctgggttccaggtcttcttcgggtggtgcttaaaagccctccaggggcttaccctccaaggccggttacccggatctggacaccctgggctctgtggccagaaaatccaggtcttgatttcgcttgggccattgcagacacgcagccaggtcgactggtcctcattcactccggtcatgcaaagacagagggaaaacctggtttggattatcggtcacccgtggctcgggagggcagggctgccctttggccccgcctatatgtttgtccgttgtacaacggggtgggaggacgctgtggcccatcctctgtcatgcagcatgtccctccttaataacgcctgttctccagacttagtatttattgagcacttgctatgtgctaggcaccatgctaaggggctaggcatctgcatcaactcctaagatcctcaaggagacacgggactattggaaggtcatttgccaaggtcataaaaagcagaattgagatttgaacctaggctttttgcttttagagatcctagaaatgtctaggacatccctcattttccttttgttggagtcccctccaaaggccttttgaaactctcccccaaatctttccacctgcagccccactcagtttccttccttccacctcaccctgtggatagaaaactggctggcaggtgttgccccttgtaccccattcctttcctcagaaaaaagccaagaccccatatctcctgatccctacagtgacttcctaagagcttgacaaatggaaggtgaccttcttcaaatgcagacacataaagttaatactcactaattattattattgtcattataaaaaatgactatgcggccatcacctgaatttccatttttatttttttattttttaaactttttattatttatttatttattgttaattgagagggtgtcttactccagcagtggtgcaatcatagttcactataacctcgacctcctgagctcaagagattctcccacctcagcctccgtggttcccattttaaatctcagttgtgagtcactctacttacctaccccccaccccctaccccaactctatgactctagctgggagtcagatagatctgctgaggtgtagatgagtcattcattctttcaacctttcattcattcaacctttcattcattcattgagtacgctaagcttattcccgcctccaggcctttgcccttgcagttccctccacctggaatgctctctccacagatcctcccatggctggctcttatctttcagcaaccagcttaaaagtcacctccacagagcagccctgtctgacaatgtgtctccatcctagccattgtccatcacatcaccctgtttaatttattcataagactaattattgtctaaaatgatttcgttcacttctacactaatcttgtttaatgtcccctttaccctataaatactagtcccaaaaggccagaaacttttttttttttctccttgagacagagagtcttgctgtgttgcccacgctggtgtttccttggactcaagcgattctcctgcctcaacctcccaagtagctgggactagaggtgcacaccaccacaccggacttgtaatttattcactactgtgtccctagtgcctaggattgggtcagcatacagtaggtgctcaagacatatttttcaaataatgattcctatttcatttgcacaaacacacgctgatatgccaactcacttgcctttatatggcgccccgcctgtgtacgtgggcctctgttggtctctgagggtcaggagaggaatcacccagggatcctctcccccaagaaacttggcccgcagtgcatggccaagggtgaaagtgacagtgctgaagaggggcctgtcttaccctgcttctgctcctccagggagttgataatgcttgtgggcagcaacggcaggtccacgctgaccttcatcgttttgcccctttgccttccagaaggatttgcccctgccccggaaaagcagcaggtgagcctggggagagacgtggcgggggctggccgccccttctcccgccggggtgggggcgccaggcgagtgcgcgggcggggcctggctcgccggcacgcagcagcgccccctcccggccggctgcagccgcagggccctccccttccctgccctcccctgcccgctgcggcggctgcagcctccgccccgcgcgcttgctccccgcgccgccgccgccgccgcctccgccgctgctgccgcacctgccaccatgtcgccgccgccgggtcatgtctgactctctctggaccgcgctttctaatttctcgatgccctccttccccggcggcagtatgttccgccgcaccaagaggtagacccccgatcccctagacattgtcccggccctccccgcaaaagccgccgctccgggtactgctgcagggcggggcccgggatgctgcgcccggtccagctgcgccagaggtgccccagctgcgccttcccgccggggttggggttgaatggggggtggtgtgggccgagtctggggggcttgcacgctggagaggacggccgcggggggagggggctgcgccactgggggtttgtggcgcctttgtctgctggcgctgcgggctccaacagcctggtgggggtagaggaagaaggggaggctggggggcttggcaccctcagaacaatagccgcagcctggcctccccccacccccatgccgcgtgctcctggacgcgctaatatgctcagtcactgcggctgtgggtgaggggacggacggaggggcttggggctccctcttcgggagctggatgctgaggggtagaaaaaagggggggtttatcataacacaacccccccccccgaacacagccttacactgaaaatagtgacacacagcgtcacacaggacatgatgtcacacacatacacacaacagccctagtggcccagatacactgggaggtgccacacatacctagccttgcagctgccacaggtcagaaccatgcacagacacacaggggcaccacgtcgtgtacacctagtaagatgtcacttacatggcgatccacacacacacagttatgtcatccaagatgcaaacatgtgtttcaatatcccatccatgcatccaagaatgtcacaacacacgatgtcatatctaggtatctcacatactatgtcacactgacatcaggataaacagatgtagggatcttgcagagacagaaccacgcaaaatcacatgttatcacattgcaagactcacctagagaatgtcaaatgtggtgacatgtttggacacagtgtcacaagatgttaaattcacacaatagatgctacatacacatggacaagcatggtgaatgtcacacccagacggaaggacagtatcggacacagactcagaatgccacacaaagacatagatacatgtaggggggatcatgcatcctggccaggcatggtggcaggcacctgtagtcccagctactcaggagggtgaggtgaggcgggaggattgcttgagcccaggagtttgaggctgcagtgagccactgcacactgcactccagccgggcgacagagcgagacattgatttaaaagaaaaaaaataataataatacaacctgcctgtgttacagcacacattgttatggacaagtggcatttcacactgtgtcacatagacacacaaatgctcaaattgtatcacacaagataaacccacgttgtgtcacacgtatcacactagaatgcattcagcgtcacacattgttgaattcatacagtggataccacacgtggatacctacagtgaatgtcacgcatagactgagacacgctcagtatcaccaatggtgtcacctagacacagtgactatcacaccatgacagacactgccctacacataatccatactgagagtttctcacacacatgtcatatgcacatcccctgccgtacacagtcctgccgaggcctgcaccacctttcttcgagaaaccctcccagggagcctccaaacacacatggatgggagataggcggggatctgagacaggaggtcagctggtggggctcaagaactcactgggctgcggcccggcccggcccccctgccttaccttccccgcagctgccgcaccagtaatcggaaaagcctcatcctgaccagcacttcacccacgctaccgagaccccactccccgctgccaggtcacctaggtgaggccagtggtagagacttggtgggtgcagactggcctacagtaggcggggcctcaggcgaggaagcgtggtcatgctacagaaggggcgcagtttgaatggaggcgaaccagtttggataaggggcggggccatgcttgtgtgggtgtggtcagtcgcagagggacggtcattggggggcggagactcaggtgggcggagactcaggtgggacggacagaaaggaggagtcgtacctgaggggcggggccatcccagatgaagccagaatcgtcttggaaggggccaggctgactcggcaacgaaaaaatttagagaggcggggccacaggcgaaggggcgtggtctccccataataggcgggactagactaaagacaggacatgctgctgtttgcacgccgctttagggaacgagagacctgacaggatttgccccctctttctctcataggcagcagtcccctggacagcccccgaaacttctcccccaacacccccgcccacttctcgtttgcctcctcccgaaggtgagtccctcccctccagggccccagaaccctgggcagaccctccccaaccactgtctgggccgccatctgttctcctcctaattgcacccgagctggggcctgaggggaccagcgagtgccccaaggtctcagcgggaaggagcgcctagccttcggggcggggcctataagaaggcggggtccaatcgccgatctggaacggggaaggcggtggggctccctttgcggcaggtcgaaagcgcgtgcgccctgggcgcggggtcttagtctctccgagccttgctctcctggccaggtgtttccatagcaacaggacggggcagccaagatgacgtgcgcaagcgcagattgcgcgatgcctatcgagggactcttggtccccgaggtgggggaggacgactagggctgtttctcaaggggaggaatctcaggtttctttccaagggtctcttagggtttctggggtgtccttaaatgaattttctatgggcctttggtgaaactgggggaggcagagaggtttctctgatgttttctggagaaacgtttctgggagtttgggcctgtctctttttctttgaactctattcattctaaaaatggtgtctaaacacctgctatgttcttaggagctgggcgtatggggtcaatgacgtcctgtctctaccctctgagtcgaatagggcaggcaggccagagaatggggatcagtgcaaaggctgatgaaggctgtgttgtgagagtcaaaggagactgtgaagacagacagctcccttgggaaagtgggggaaccgcctattgaccatggaatttagctgagggcaatagagagccaggacaaggctctgggatagggtctcacatgtttatccgcaagcggggaggactgagcgaggggactgctgggaggaagaaggaagggaggagtccaataaatggggtgtgtgtgtgtccttgtaactgtgcaaagtgtgctggtgtgtgtgtgtgattgtcactgtgtgagggattacgtgcctatgcaatggcacgagtctgcgaatgtgaacgtgtgaacatgtgtctgtaggattgtaagtgtctgtgaatatgtgagaggagcaagtcaggtatgtctccaggtgagcgtgcaatctgtgtgtgggtgtaagcgtgtgtgagtgtgtggctgtgagatagtaaacacagagtcacagtgtttactgtctctctctctctctctcttttttttttcttttcttgagacagagtctcgctctgttgcccaggctggagtgcaatggcgggatctcggctcactgcaatttccgccttctgggttcaagcgattctcctgcctcagcttcccaagtagctgggattacaggcgcctgccaccacgcccggctaatttttgtatttttagtagagatggggtttcaccaggttggtcatgctggtctcgaacttctgacctcaggtgatccacccgcctcggcctcccaaaatgctaggattacaggcatgagccaccgcgcccgtccagtttactgtctcacagccacacgcttacacatgcacatgctaatgtgtgttgtgcactcacatgagcacgcgccgatgtgtgtccctgtgtgtgtgcatctgcgtgcgagtgtgaatgagtgtgtcgctgtgtgcaagtttcaatgtgtggtagtgagcgtgggtgtctggaacgtgcatctgtgtgaatgtggaagtgtggagtatgtttgggtgagtctgtgtgtccgagtgtgagtactgagtggaagcacatgtgtctataggtgagtgcatgtctggtcttgcacgcgtgattgtgcattagtgtgtgagagtgtgatatttgggtccatggatgggatagtcaatacgtgtgggtgtctgtgttgaggagtcatgtgtgagtgtgtgtcttcgtgtgtgtgaagtgtaaatgtgtgcactgccagtatgtgagcctgacctgatagtcacaccaacattaatggatttggctgcaacagtgactgtgtctgtgtgcacgagagcataaggacacaatattctatgtcagaacatgttggggggtgggacgggtcttttttctctgagaagatccaagggtctccctcagagctttctcatggagagtgttcacttgggggaaatttctagaatctctctggaaaggcttcactgggtgggggcttttccagttctcggtgtccactctgaatgataagagaggggaccgtggggaggagagtggagacggatcctccctccaattcccggtgcctgcctggaagagtccctctttatccccttgattctgagggccttgaggaatcttagagtgcagatatattcccccaacccccaccctggccctggccagtggcttcacccacaccctgaggagttgggggaccgctggggccttgtggcctctgagcaccttggctgggttccagggcggacggacgccggtggtctctggcctcgctcccttcatctggctatggcaccaacacgcccagttccaccgtctcggtgagtgtggaaagtaggtgggtgggccggtgggtaaggaattcaggggccctccagcctgaagacccacacccaggccagcagtccaggctgggcttgatgacagtttagggccaggctcagtgactcaagcctgtaatcccagtactttgggaggccaagacagaaggattgcttgagcctaggagttcaagaccagtctgggcaacatagggagacccttgtccctacaaaaaattaaaaattatctgggcgtggtggtgcacacctgtggtccccactatttgggaggctgagacgggaggatcgctggagtctgggaggtataggctacagttgagctgagatcgcactgcagcattccagtctggatgacagagtgagaccctgtctcaaaagaaaaaagcaaaaaaagacagtttgggtttccccattcttcaaaggtgttcacttgtccatctattaaagagttatgggtccgccccactcagagcccaatgctctgccctcaacacatttctgggagggtccttcctactcatttctgactcactcatttacagctggtgacataaggctctgtgagttaagccatttactctgatatcagcagctgggctgggccaggccacagctttcacccagagcccacttgctcaccccttggaacacccaaagtcccttcatctgctcccttttctatccatgcccatagttcccttatccagccattggcatgatgttcagcagacatttgtcatgagattgtcatgtggtaggcgggttctgcaagctgggccagagtgtaaatattcacgcagccctcatgggggaagacaagccagtaagaaggcattcacaaaatagaatggtcagaactttgatgcaagtagcacaaggtgaggtgataggggagaggcatgtgactcagattggggggttgtcaaggaaggcttcctggaggaggtgacattgaaaccaagacaacagaccagcaggagtttggcagatggaagagaagggagaagagtgttccaggaaggggaagagcatgtgcaaacctctagaggccacagaacttgcagcatttgaaaagttgaaagtagctttgtggggctgaaaatttgggatgcgggggaggaatagagatgatgcaggcagtgaccttgatcaggctggaaccttgtcagccagggcagcaagggagattttattctaaatccagtggggaagccatggaatggttttatttctttatattaaattgtactaaaatttcagtttgaaccatttgaaattgtgattatgtaggctatagataatgcacactaattaaaaaaataaaagagatggatggggtggggaattttaaccagaggagtgagcaatgtgatgtttaaaaatatcattctggccgggcgcggtggctcatgcctataatcctagcattttgggaggctgaagcgggtggatcatttgaggtcaggagttcgagaccagcctggccaacatggtgaaaccctgtctctagtaaaaatacaaaaatgagccaggcgtggtcatggatgcctgtaatcccagctactcaggaggctgaggcagggagaattgcttgaacctgagaactggaggttgcagtgagccaagactgcaccactgcactccagcctgggtgaaagctatatgaccaggcatggtggctcacacctgtattcccaacactacgggaggttgaggtgggaggattgcttgagcccaggagtttgagaccaacctgagcaacgtgatgaaaccctgtttctacaaaaaaaaaaaaaaaaaaaaaaattagccaggtgtgatggcttgtgcctgaagtcccagctactcaggaggctgagatggaaagattgctcgagcccaggaggtgggggttgcagtgagtggaggtcgagccactgcactccagcctgggggagagagaaacaccctgtctcgaaataaaaaaaaataaaataaagcaagaggagagccaggcatagtggctcatgcctgtgacccagcaatttttttttttttttttttttgagatggagtctcactctgtcgcccaggcctggagtgcaatggcaccgtgccggctcactgcaacctccatctcctgggttcaagcaattctcctgcctcagcctcccgagtagctgggattacaggtgcccaccaccatgcctggctaatttttttatatttttagtagagacggggtttcaccctgttggccaggctggtctagaactcctgacctcagtttttctgcccgcctcagcctcccaaagtgctgggattacaggcgtgagccaccgagccctgccctcagtcccagaactttgagaggccaaagtgggagtattgcttgaagccaggagttggaagccagcctgggcaacatagagagaccctgtctctgcaaaaaagaattagccaagcatggtgtagtcccagctacacagaaggcagaggggggaagattactttagcccaggagttcaaggcttccgtgagccatgattgtactacatccctctagcctgggtgacacaaggagaccgtgtctctctctctttttaactttaaataattttaataaatagagacacagtttcactatgttgcccaggctggtctcaaactcctgggctcaaatgatcctcccgccttcgcctcccaaagtgctgagattacaggtgtgagtcaccatattcagtggagacccttctctaaaataataatgataataaagcaagaggaaacaagatagagtagggatagggaataatgggtgtgtattcagaggaggtcttcccgaggggtgacattgaagcaaaaatttgaaggatgagaaggagggatccatagtagatgtgttccaagcagaaagaatagctaatgcaaaggccctgaggaaggagcttgcctggcttgtccaaggaccatcaaggaggccactaggctgggtgcggtggcttgtgcctgtaatctcagcactttgggaggcagaggcaggtggatcacctgatgtcaggagttcaagaccagcctggccaacatggtaaaacactgtctctactaaaaatacaaaaaattagccaggcgtggtgacaggcacctgtaatcccagctacttaggaggctgagtcaggagaatcgcttgaacgcgggaggcggaggttgcagtgagctgagatcacactccaaactaggcaacaagaacgaaactccatctcaaaaaaaaaaaaaaaaaaaaaaaagaaggccactgtagctggagcagaggaagtaagcaggagagtgagaaaaatccacggcagggacccagggcaggatgaggcaggaccttgtataactggggaaggacttgggtgttcaccctgagtaaggtgggagccaccaagggttctgaacagaggaggctcatgacttgacccaagctttaacagactcactgtctccacccctgtctgtccctgtccacctgtctgtggccaagagtcccagccaagatcctaggatccaaggatcgtaaatcaggtcctgatcctggccttgcccagtgaccccatcggctttgggagtcccagctcagggtcctgagctgttggggggcccatggtggctctgaccccggccctgcccctgtccccagtcctcctgctcctcccaggagcgccttcaccagctgccctaccagcccacggtggacgagctccacttcctctccaaacacttcgggagcaccgagagcatcacagacgaggatggtggccgtcgctccccagccgtgcggccccgctcacggagcctcaggtgggcaggcatccctcctccttcgtaccaagctagtggtcttaggacttgtgcttagagagacccctgtccccgcgaataaaagggttacatcttggggcgggggctctctgcgggcttggaggcagaggactcgacaaaatgggcttctctccccgcagccccgggcgctccccctcctcctacgacaacgagatcgtgatgatgaatcacgtctacaaggagaggttcccgaaggtgaggtgggacccgaggcggtcacggggtgaccaggcggcctgcactctcgctcgccttatccccgcgcgccccctggcggcctcggtgcgcagcgcaggctcctggcggccgcagccttcgggcacagccccgcgcccctcctccgtccctcccgcaggccactgcgcagatggaggagaagctgcgcgactttacccgcgcctacgaacccgacagcgttctgcctctggccgatggcgtgctcagcttcatccaccaccagatcatcgagctggcccgggactgcctgaccaagtcccgtgacggcctcatcaccacggtctacttctatgaattgcaggagaacctggagaagctccttcaagacgtgagtgcacgcggaggccgggctgatctcaggctcagcaccgccagattgtgcccaatgcacccctttcttcaccccacatacattcagggagctcctaccacgttccaggcactggcgtggagctgaggactcaggggtggaagtggtcccttccctaggtctgaccgactgaagaggcaggaatttcacctcgctcatttcccttaggtctttactcaaatgtcaccttttcaggtggcttcttaggcggtccccagtcatttaaaatattaaactcggccgggctcggtggctcaggcctgtaatcccagcactttgggaggccgaggggggcggatcacgaggtcaagagatcgagaccatcctggctaacacggtgacaccccgtctctactaaaaacacacacacacacaaaattagccgggcgtggtggcggacgcctgtagtcccagctactcgggaggctgaggcaggagaatggcgtaaacccgggaggcggagcttgcagtgagccgagattgcgccgctgtactccagcctgggcgacagagcgagactccgtctcaaaaaataataatagtaaataaaataaaataaaataaaatattaaacttagccgggtgcggtggctcaggcctgtaatcccagcactctgggaggctgaggcaagtggatcacctgaggtcaggagttcgagaccagcctggccaacatggcgaaaccccgtctctactaaaaatacaaaaattagctgggcgtggtggtgggcgcctgtaatcccaactacttgggaggcagaggcgggagaatcgcttgaacctgggagtcggaggttgcggtgagccgagatcacaccattgcactccagtctgagcaacaagagtgaaactctgtctcaaaaataaataaataaatgaaataaaataaaatattaaactctactcacatttatcacccactttctcctcagtttctccttgacactcagcaccatccatcatactgtgtatttttgcttattttatttcatgtctatccttctccaatgtcagccccatagttggtgagggtgggggggtggagttgtctgttctgtccactgctgtgtccctgctgtttggaacaatacccagcacacagtaggtactcaataaatgttgggtaaattgatgcttgaatgtccctttgcagtggcatgcacctgtagtcccagctagctacttaggaggctgagatgggaggattgcttgaggtcaggagcttgagaccagcttgggcaacatagcaggaccccatctctaaaacaatttaaaaaatttaagccaggcgaggttgctcacgcctttaatcccagcactttgggaggctgaggcgagcagatcacgaggtcaggagtttgaaaccagcctggccaataaggtgaaactctgtctttactaaaaatacaaaaaagttagccgggcttggtggcacgtgcctgtaatcccagctactcaggaggctgaagcaggagaatcgcttgaatccgggaggcagtggttgcagtgagccgaggttgcgccactgcactccagcctgggcaacagagtgagattctgtctcaaaaaaaataaaaataaaaataaaaataattagctaggtgtagtggcacacacctgctgtcccagctacttgagaggctgaggcaggaggatcacttgatcattcattaattccaccaatatttatttatttatttattttattttttttggagacagagtctcactctatcccactgggctggagtgcagtggtgcgattttggctcactgcaacctccacctctcaggttcaagccattctcctgcctcagcctcccgagtagctgggatcacaggcacccaccaccatgcctggctaatttttgtatttttagtcgaggcagggtttcaccatgttggccaggctggtctctaactcctgaccttaggtgatccacctgcctctgcctcccaaagtgctgggattacaggtgtgagccaccatgcctggcccccaccaatatttattaagcacctactatgggcctggcactagcctaaaagctgggaaatcaactggaaataaaacaaaaattcttgtctttggagagctgacattctattaatagcaggaagagacagaagataaacaataggcgttagaagctaacccctgtaatcccagcactttggggagctgagacaggaggctttctggagcccaggagttgcagaccagcctgggtaacatagcgagaccctgtctctacagtaaaacaagtcaaacaaacaaagacccaataggtattagggctgagaccaggaccagggtaaagcaagtaattatttcttcccccagaacattaaattaatttttgaaaaacttgaaaagtagataaatgaaaacccaacattattttaagtttacatattttatttataaccaagccagaatgtgttataattttactgtcctggttttaatgaaagcaaactcatcaataatactattttcattgaaaccattagacattttcaaagacacattaaaacacatataggttggtgcatacttttttttggctcaagttacaatatggctaggcacagcctgttggattctgtctttatttaattttctttttctttttctttttcatttgagatggaggactctctatgttgcccagggtggtcttgaactcctgggctcaagcaatcctcctgcctcagcctcctgagtagctgggattataggcatgtaccaccacatctggcttaaattttgatattttggcttatgatagatttttggcattaattttaggcttttcaagtattgcaataagatattagttttttcttttctttttttttttttttgagacagtctcactctgctacccaggctggagtgtagtgatgtgatctcggctcactgcaacctccacctccctggttcaagcgattctcttgcctcagcctcccaagtagctggcattacaagtgtgtggcactatacccagctaatttttgtacttccagtagagatggggttttgccatgttgggcaggctggtctcaaacccctgacctcaagtaattcaccctcctctgcctcccaaaatgctgggattacaggcgtgagccactgtgcccggcctctttttcttttctttttttctttttttttttttgagacagggtctctctctctgtcacccaggcaggagtgcagtggtataatcagctcactgcagccttagccccctgggctcaagtaattctcccacttcagcctcccaggtagctaggactacaggcacacactaccacacctggctaattttattatttgtagagacagggtctcgctatggttttgttgtttgtttgtttgtttgtcattgcttttgttttgagacagagtctcgctgtgtcacccaggctggagtgcagtggtgtgatcttggctcactgcaacttctgcctcccaggttcaagggattctcctgcttcagcctcccaagtagctgggattacaggcacctgccaccacgcctggctcattttgcgtttttagtggagatggggtttcaccatgttggccaggctggtttcaaacttttgacctcaagtgatccacccacctcagcctcccaaagtgctgggattacaggcatgagccaccgtgcccagcctcattatttttactgtgtggcttgggcttcagtctcctcacctgtaagatgggacagtagcagcagtatgtactctgaggggctgagagaggggccgggctgaggcagagtgcctatgagccctgtccctctgtgtcccctgccacaggcctatgaacgctctgagagcttggaggtggccttcgttactcagctggtgaagaagttgcttattatcatctcacgccctgcgaggctgctggagtgcctggtgagggggctgggcatgggtaggggtgggttggtagaccctgggagcctgtggtgagcccactcctgccctgcctcaggaattcaaccccgaggagttctaccacctgctggaggcggccgaaggacacgccaaggagggccaccttgtgaagacggacatcccccgctacatcatccgccagctgggcctcacccgtgacccctttccaggtgccggctggtgggcgcagggggactgggggtgagcaggcccagaacccagctcgtgctcactctcagtccctccctagatgtggtgcatctggaggaacaggacagtggtggttccaacacccctgagcaagacgatctctctgaggtaaggctgggtggctaagcggtcagtaccctggttcctgggagggcagggtggggctcatctccggcttctttgccctcaggctttgtggatctcttggtcctacactctgagcctcagttttcccatccataaaatgggattaataatagctcttccagagcctggcatgctggctcatgcctgtaatcccagcactttgggaggccaaggtgggcagatcacctgaggtcgggagttcgagaccagcctaaccaacatggagaaaccccgtttctacttaaaaaaaaaaaaaatgcaaaaattagccaagcctggtggcacatgcctctaatcccagctacttgtgaggctgaggcagaagaatcacttgaatccaggaggcagagattgctgtgaactgagattacaccactgcactccagcctgggcaacaagagcgaaactgtctcaaaaaataaaataaaataaaataaaataattgctcttcccctgtgacctctttgtcatgttaaaatccatgaaacataaaatttaatttacttttttaaccattttattttatttttatttatttatttatttattttttgagatggagttttgctcttgttgcccaggctggagtgcaatggcactatctcagctcaccacaacctccatctcctgggttcaagcaattctcctgcctcagcctcccgagtagctgggattacaggcatgtaacaccacacccggctaattttgtatttttagtagagactaaaatttctccatgttggtcaggctggttgcaaactcccaatctcagttgatctgcccatctcggcctcccaaagtgctgggattacaggcatgagccaccgcgcccggcctttttaaccattttaaaatgaacaattcggggccgggtgcagtggcttaggcctgtaatcccagcactttgggaggccaaggcaggaggattgtttgtgctaaggcatttgagaccagcctgggcagcataaaaaatcagctgggcgtggtggtgcacccctgtagtcccagctactcgggaggctgaggtgggaggatcctatgagcccaggaagtcaaggcttcagtaagccatgatcacaccactgcactccagcctgggcaacagggtgagaccctgtcttgaaaaatgaaattaaaaataataaagaataggccaggtgcaatggcttatgcatgtaatcctagtactttgggaggccaagatgggtggatcacttgaggtcaggaattcgaaaccagcctggccaacatggtgaaaccccatttccactaaaaatacaaaaaaattagttgggcgtggtggcacatgcctgtaatcccagctacttggaaggctgaggcaggagaattgcttgaacccgggaggtggaggttggtgtgagccaagatcccaccactgcactccagcctgggcaacagagcgagactctgtctcaaaataataataataataataataataataataataataatgattaatagtaataaataaacaattctgcagcatttagtaattcaccatgctgtacagccattagatctatgtagttgcagaacttttttatcacccccaaagggaaacctcacacccattacacactccctcctcattcctccctccctgcagtccctggcaaccactaatctattttctctctctgtggaattgctttttctggatatttctttttttttttttttttgagacagaatttcactcttgttgcccaggctggagtgcaatggcgtgatctcggctcactgcaacctccgcctcccaggttcaagcaattctcctccctcagcctcctgagtagctgggattataggcatgcgccaccacacctggctaattttgtatttttagtaaagacagggtttcaccatgttggtcaggctggtctcgaactcctgacctcaggtgatctgcctgccttggcctcccaaagtgctgcgattacaggcgtgagccacatgcctggcctttttctggatatttcctataaatgggatcgtatgctctgtggcctcttatgactggcttatttcacttaacataacgtttctgaggtttatccatgttgtagcttgtgtcactgcttcattcatttttatagccgagtaatattccattgaatggtagatgcattcatccactggtgaacattgggttgtccatctttcatctgttgtaaatagtgctcttatgaatgtgggtgtacaaatatttggctggacaactgctttgagttatttaggatatacgtctagaggtggaatttcttggtcatatggtagctctatgtttaacttatagaggaatcctgcatgggctttcgagcaagctaactggctgtatgtgttaatggcagctcagcatggggaaaattgccaattctattcccaggccagccacactttggcagatgttccagatgtctagtggagagtcctaccccaatggccacacatgtgttttctctgaactgcctagtatttttcaaaaatttgggctgggcctgatggctcacggctgtaatcccagcactttgagagactgcggcgggtggatcacttgaggtcaggaagtcgagaccagcctggccaacatggtgaaaccctgtctctactaaaaaaatacataaaattagccaggtgtggtggtgcccacccgtaatcccagctacttgggaggctgaggcaggagaactgctggaaccagggagacaaagattgcagtgagccgatatcaaaccactgcactccagcctgggtgagagagtgagactccatcttgaaaaaaataaaaatagataaataaaagaagcaaaatataaaaattgaaagatttttgcttcaaaatctgggtttgggccttctcttgaaaaatcagaagttctagggctgggtgtagtggctcatgcctgtagtcccagcactttgggaagccaaggtggcaggattgcttgagcccaggagtttgaaaccagtctggacaacatagcaagaccctgtctctacttaaaaaaaaatagaagaagaagaagttctaataatactgtggtggaaccagctgagtgggggtggtcctgtgatattgggtacctgccccttcgtcatccatggcctccaccctggtctactggcccctgaagacgcttaagtttgtaatctttatttcaaattgtgtctatacagtcacacagatatatacacatacctttcctttatgtatatatttaaaaggaatctcacaatatatgccatttgtttaattttttgaataggtaatggaatgacatcactcaaaatctaaaactctaaaaaaaggtatttatctctcattgtttgtaggattctgttattccttttaatcaaacttgttaattgagtgattcaaatcttccatctccctattcatttatcttgcctgattaatctaatagtttctgagagaaatgtgaaaccttattttaagcaaattctccttgtaattctgtcaattttttttttttttttgccattttggtttttatttgattataggtaagagttccatacaatagtgtgcgaagtattgcaaacaataaaggaaaaatacagcataagatacctcttacactctgcccaattctgtcaatttttatgtcagatatttttaggctacattctttggagcatataagttcaatatttttatatatcatagatctttttatgtaatatctatgtaataaatctctttgtccctaagaaaaatcaaaataattttcaagaaagatatacagtgaaaaaaatcttactcctaccttttttccccattgccctatagccctgaaatatgattacatagttttattttgccacttttttttttttttttagacaaagttccactcttgttgcccaggctggagtgcaacagtgtgatctcggctcactgcaacctctgcttcctgggttcaagtggttctcctgcttcagccttccaagcagctgggattataggcaaccaccaccacgcctggctaagtttttgtatttttaatagagacagggtttcaccatgttggccaggctggtctcgaactcctgaccttcaggtgatccacttgccttggcctcccaaagtgctgggattgcaggtgtgagccaccacacctggcctttgccacatttttttgcacataaacgtacaatacatattgcctattgcatttttacacttaataaaatagaggactttctaaatccatagacagagagtttcctcattatttctaacagtggcacaatgtttctttatctaactaccccacatgtgtttgtttggctaatttaacgtatggattattatttccaatctcacaatgagcaagatagtagatataccatttttcacatgtgcaagtatatctgtagcataaattcaaaagtaaaattgctgagtcaaagggaacatgtatttgtaattctgatctgtatcaaacagtaatttacactcccaacagcaaagtatatatgttcacctacatatttgcccatagaggatatcaggttttggagttttttctcccaatctgctaggtgaaaaatggtattttgtggtagttataatttgcctttctgttattgtaagtgagattgagaattttttttttttgagatggagttttgctcttgttgcccaggctggagtgcaatgccacgatctcggctcaccacaacctctgcctcctgggttcaagcgattctcctgcctcagcctcctgagtagctgggattacaggcatgtgccatcatgcccagctgattttgtatttttagtatagatggggtttctccatgttggccaggcttgtctcgagctcctgacctcaggtgatccaccagcctcagcctcccaggtgatccgcccgccttggcctcccaaagtgctggggttacaagcgtaagccactgcacctggccaagaatcttttttttttttttgagacagagtctcgctctgtcacccaggctgaagtgcagtggcatgatctctgctcactgcaagctctgcctcccgggttcacgccattctcctgcctcagcctcccaagtagctgggactacatgtgcccgccaccatgcctggctaattgtttcgtattttcagtagagatggggtttcacagtgttagccaggatggtctcgatctcctgaccgcatgatccgcccaccttggccttccaaagtgctgtgattacaggcgtgagccaccgctccaggcccgaatcttttagtatgtttaagagctgtaactctggctgggtacagtggctcatgcctgtagtccctactctttgggaggccaaggcaggcagattgcttcagcctaggagttcaagagcagcctgggcaagatggcaaaaccaaaatactaaaattagcctggcatggtggcatgtgcctgtggtcccagctacctgggaggctgaggcaggagaatcacttgagccctagaggtggaggctgcagtgagcaccactacactccagtctgaatatcagagtgagaacctatctcaaaaaaaaaaaaaaaaaaaaaaaaaaaaaaagctctaactgtaatttacttacctcacccacttttttctcttcaattgttaggcttttgttattgatttttgggaactctttatatatttatatattaggatgactattttgttggtttcctgctatcttttctagtggaagaagatgagaatatgtcttcagagtcagtcttgggttcaagtcctaactttctctttcattatggcacttggatgaaggactctttcattctgtgcctcagtttccccatgtgtaaaatgaaattaaaagcatcctgctctcatgatgatgatggtggtgtggtctccatctttttcctgaagggccgcagcagcaaggccaagaaaccgccgggggagaatgacttcgataccatcaagctcataagcaacggtgcctacgggtgagccacccggggctctggcggggggagggtggcggaggccgggtgtctcggaggtgacggccggtcctcgctctctccccctgcagcgctgtctacctggtgcggcaccgcgacacgcggcagcgctttgccatgaaaaagatcaacaagcagaacttgatcctccgcaaccagatccagcaggcctttgtggagcgcgatatcctcaccttcgccgagaacccgtttgtggtcggcatgttctgctcctttgagactcggcgccacctctgcatggtcatggaatatgtggaaggtgtggctgcctgcggggctgcagggaagatggggccgtgctcactggtcagggctgcggggtggcctgcctgagccgcagtctccatattgattagtcggcctgtatgtttatccatctatttatttctccagtcattgatttgtccatccattctacctatatatttattcagtcatctattggtttatttgtttttcatttcattcagcataaaaacattcagtctgacccattatccatccatctatccttctatctactgatgtgctaatccatctgtttttccatccatacatccatgaacctgtttttatttatttatttatttattcatttattcatttatttattttttgagacagagtcttgctctgtcacccaggctgcagtgcagtggtgcaatctcggttcactgcaacctccgactcccaggctcaagcgattcttatgcctcagcctcccgagtagctgggattatgggcctgtgccaccattcatgggtaatttttctatttttagcagagacaggatttcgccatgtttgccaggctagtcttgaactcctgaccttaagtgatctgcctgcctgggcctcccaaagtgctgggattacaggcatgagccactgtgccaggcctattttattttatttatttatttttgagacaagatctcactctgttgctcaggctggaatgtagtggtgcgatcacagctcactgcagcctcaaatgcctgggctcaatcaattctcccacctcagcctcccaaatacctgggattataggtgcggaccaccacactcggctaatttttgggaggccaaggtggggagatcacaaggtcaggggttcaagaccagcctggccaacatggtgaaaccctgactctaccaaaaatacaaaaattagccagatggcacactcctataatcccagctactcacgtggctgaagtgggaggattgtttaaacacaggaagcagaggttgcagtaagccgagatcgtgctgctgcactccaggctaggctgagatcatgccattgcactccagccctggcaactgagcaagaccctgtcccgcaaaaaaaaaaaaaaaaaagttttttgttttttgtttttttttgttcgtttgttttgttttttatgcagtctccctgtattgcccaagttagtctccaactcctgggctcaagcaaccgtcctgcctcagccttccaaagtcctgggattacaggcacgagccaccgagcccatcccatatacctgtttattaatccacctttccatccatccctcacatcccgcaatttgtctttgtggttgtccatctgtttatccatccgtatgtctgtttaccattatacacctatttttcttttttttgggggggacggcgtcttgctctgtctcccaggctggagtgcagtggcgcaatctcagctcactgcaagctccacctcctaggttcacaccattctcctgcctcagcctcctgagtagctgggattacaggtgcccgccaccatgcccgactaattttttttgtatttttagtagagacggggtttcaccgtgttggccaggatggtctcgatctcttgacctcatgatccgcccacctcggcctcccaaagtgctgtgattacaggcgtgaaccaccacacccggcttatacacctatttttcctttttctttctttctttttttttttttttttgagacagagtcttgctctgtcaccaggctcgaatgcagtggcgctatctcggctcactgtaacctccaccttccaggttcaagtgattctcctgcctgagcctcccgagtagctgggattacaggtgtgtgccaccacacctggctaattttttgtatttttagtagaaatagggttttcaccatgttggccaggctggtctcgaactcctgacctcaggtgatcctcccacctcagcctcccaaagtgctgggattacaggcgtgagccatagcttgcggcccatatattgtttttaatccatccgtgcatgtattcacccaaatgttaatccatctattgtccaaaaccacacatgctgtggctattatgacacatacatgatccctggggcctcagctgtgcctcctccaagccttccagtcaaccatccagtcactcaacgaacacctcctcatcatctccctcgtgtcacatgctgtgctaggtgccagtgacacagaggagacccaggcacagacatctccccgccatggagattccattctggtctgtatagacagacaataaacaagcagagcaagccaaagagataaggacatttatttatttatttatttatggagtctcgctctttcacccaggctggagtgccgtggcgcaatcttggtgcacagcaacctccatctcccaggctcaaggattctcatgcctcagcctcctgagtagctgggactaaaggcgcgcctccaccatgcccagctgatttttgtatttttagtagagacaggggtttcaccaggttggccaggctggtcttgaactcctgacctcaggtgatcagcccaccttggcctcccaaagtgctgggattacaggcatgagccaccatgcccagccagggcatttcatagtgaggacatgaggtccatgaggctggaggaggtgatggggaggcaggcagggagcttctcagaggcctggattatgatggaataagtgacctgctagtacaaagtctcttaggtgacaatttagatttggaggagtggcaagcaggcccatggagccgaaggcaagtgagcaagggaggggagatgaggatgaaggggcgctgatgaggagggtattccagagactggaatggcattggatttcattctgaatgcaacagaaggtcactggagcattgttgtttttttctttttctttttctctctttctttctttctttctttctttctttctttcttttttgagatagagtctcgttctgttgcccaggctggagtgcagtggcgcatcctcggctcactgcaacctccgcctcccgggttcaagcgattctcctgcctcaacctcctgagtagctgggattacaggtgcccgccaccacgcccacctaatttctgtatttttagtagagatggggtttcatcatgttggtcaggctggtctcaaactccacacctcatgatctgtctgcctcggcctcccaaagtgctgggattacaggagtgagccaccgtgcctgcctttttttttttttttttttgaaatggagtctcactcacgctgtcacccaggctagagtgcaatggggtgatctcggattactgcagcctccgtctccaaggttcaagtgattctcctgcctcagtctcccgagtagctaggattacaggcgtgtgccaccacatctggcaaatttttgtacttttagtagagacggattttcaccatgttggccaggctggtctcgaattcctagccttaaatgatccatcagtctcggcctcccgaagtatggggattacaggcgtgaatcactgcgcccagccttgttttgttttatttttagtgcattgtccaggctggagtgcagtggtgtgatcacagcttactgcagccttgaactcctgggctcaagcaatcctcccacctcagcctccaaaagtagctgaaactacaggcaggcaccaccatgtccagctaatggagggttttaagaagatttgatatgatcagatttatgttttaagaaaatccatttggaggcccattatagtagcttacgactgtaatcccagcacttacagtgggagaccaaggcaggcagaacacttgtggtcaagagtccaagatcaacctacccagcatggtgaaaccctgttgttgttgtttttttcttttcctttttttttttttttttgagacagagtttcgctctggctaaactcgttgcccaggctagagtgcaatgacgtgatcttggctcaccgcaacctcctcctcccgggttcaagcgattctcctgcctcagcttcttgagtagctggaattataggtatgcaccaccacacctggctatttttgtatttttagtagagatggggtttctccatgtcagccaggctggtctcgaactcccaacctcaggtgatgtgcctgcctcggcttcccaaagtgttgggattacaggcgtgagccactgtgcccggccaatgaaaccctgtttctactaaaattacaaaaattagccaggagtggcggtgcacgcctatcatcccagctactcgggaggctgaggaacaagaatctcttgaacccgggggcggtgagtgggcagaggttgcagtgagccgagatggagccactgcactctagcctgggtgacagagccagactctgactcaaaaaaaaaaaaaaaaaaaaaaagagaaaaagaaaaaaattaagaaaagataatccatttggctcttgtggagagagcagaatcaggagactaggaggtagatgactgctctagtccaggttcattgcagaggaggaggagagaagggggccaaatcagtatctctatggtgggtctgtgtgcacaatagatgtgctcaaatgcagattcctgggccccaccctcagagagtttctgaaaccagcaaaatctcgcagaaaagagaacagaaaaaagaaagaaatcattagctttcttggtcattggtgattgaaaaaccaatattaccttcaggaatggctggatgtaggtgctcaaaccattccatcaggaaactctccatctcttggctctgtactcccacatgtgggcttccttctagacaagccctcatgtagcaaggttgccatctagcagatctcagcttacattctatgagcttagcaattcttacaggaaaagagtgaaaattccaagggctaactcactggagcaacttgggttacatactgccccggttgctgcacatggaaggaaatctagcctttgtaggataaaaaggaaatagatattgagaaactgaaataccaatgccaattacagtaaatctggcagaggggcagaggcagtggccaacactttgggaagctgaggcaggaggatcctttgaacccaagagttggagaccagcttgggcaacacaatgaaactcgtttctacaaaaaacttttttttttttttttttgagacggagtcttgctctgtcacccaggctggactgcagtggtgcgatcttggatctctgcaacctctgcctcccaggttcaagccattcttctgccttagcctcccgagtagctgggattacagccgtctgccaacaagccaggctaactttagtattcttttttcagagatggggtttcaccatgttgaccaggctggtctcgaactcctgacctcaagtgatccacccgccttggcttcccaaagtgctgggatttcaggcgtgagctaccatgcccagccttgaacaattttttaaaaatcagctgggcatggtggctcacatctgtagtcccagctactcaggaggctgaagcaggaggattgcttgagctgggaggttgaggatgcagtgagctgtgatcttgccaccgcactctagactgggcaatggagtaagaccctgtctcaaaaaaaaaaaaaaaaaatctagtgaagaccaagaatctgcatctaaggcttccagctccaaggttcagacaccaggagatagagggctgtgcttccagatgcagttgataagtgggtagcctttgttccccaactaaacctcacctctaccaacaactgcctgcatgacccatcctttctttgagtctccatccctttgtgtataagatgagctgatgacaccaactttggaggatggctaagaggacaagaagaacccagtagaggacctggagggagggaggcccctctcagagcctcagtttcccttatctataaaacgggtacaacataacatgagaagttggtgctatggtgcatgtccagagagaggaatgcctccctttttatgcgggcccatttcctggcctgcaggcggcgactgtgccaccctgctgaagaatattggagcgctgcccgtagagatggcccgcatgtactttgctgagacggtgctagccctggagtatttgcacaactatggcatcgtgcaccgcgacctcaagcctgacaagtgagctttgatctttcccatcactccctctgtccctcgggaggccaggaggcagaatggacgggcctcatccctgagatccccacctgtgcctacagcctccttatcacctccatgggtcacatcaagctcacagatttcggcctctccaagatggggctcatgagcctcaccaccaacttatatgaaggccacatcgagaaggacgcccgagagttcctggacaaacaggtgtgtgtgcgggcatgggggtcgctgagggtggagtgaccctgcaggacctcgggaacccagggcctggtggggggcacagctctcccttgagggccctcctctggctggggcgtgggctgacagcctgcccccaggtgtgtgggaccccagagtacatcgcgcccgaggtcatcctgcgtcaaggctacggcaagccagtggactggtgggctatggggatcatcctctacgagttcctggtgggctgtgtgcccttcttcggagacacaccagaggagctatttggacaggtcatcagtggtacgtggcttggcagtgtacaggggcagagtgtggtgtgcacggagagatggacaggctcagggttccagggatttcaaaagcgaccccccagaggatcgcttgcactcaggaggtcaaggctgcagtgagccatgatcgtgccactgcactccagctgggtgacacagtgagatcctgtgtccaaacaacaacaacaacaaaaaccgcccctaagttccgttttgttttgcagatgacatcctgtggcccgagggggatgaggccctacctacggaggcccaactcctcatatccagcctcctgcagaccaaccctctggtcaggcttggggcaggtaagtccgccatgcagaggagctgagggcccactgatagagagcaggcctccaaaaccccaggcccagcctgtgctgtggccccggggcggaagacatggggggcggggctgggctgctgggttggccatcagctgtggctggaatcccttccgtcccaggcggcgcttttgaggtgaagcagcacagtttctttcgagacctggactggacagggctgctgaggcagaaggccgagttcatcccccacctagagtcggaagatgacactagctactttgacagtgagctgggacaccaggcacgacctgggtcgaggggtgggatccgggaagagggaccctggggtaagtaaagcctgggatagggcctggctaagtaccaagatgtgatgcctaggtgcgaaggtggtattttggtgggggcggggccaagtggggcggggctgacatacaggcggggctcaggctgaaatgtaggtaagaacctgagattgggctaggtgtggggcctggcctgggtgagttgtgagtgtgggcctggaactgaactagagagaggtactagcgctcagaatggcctggggtgatgccagggtgcagagcactgtaggtggagcgtggcctctttggaggcggggctagacggtgccactgagaatggggcaaggaccttgcctgggagcggagcctaaattaaatacactaatgaggcaggggcgtggcctgacctgaagacttgtaaacccgtcttgaaccaggactgggctcctgtggggatgtgatatgaggaggaaccccgtaccctcagtcacagcccatacccgctccccagcccgctcagacaggtatcaccacgtgaactcctatgacgaggatgacacgacggaggaggagcccgtggaaatccgccagttctcttcctgctctccgcgcttcagcaaggtgggccaagtctgggtgtgggacagggcgagaccccaggagggatggggcttggagagacagtgagaaacaggttccctggtgcccaaggtctcaggagcgggaagttattgatggggcgggagtctggaaggtggtaaggccacgcaagaggcaggttcgggagtctatgggacgggcctttggcactgagtggaatctaacaggaatcaggacagttgtgcagattgaggccatggtggggcggggctaggtgtgggtggggcggggtcaggacgtgggaatgaggccagcagcgaaggcggagtaaagcccagcgaagtcttgcttttatttatttatttttattttttctaataacgggcagagaagccataggccttgctttgagaagcaacttgtagaggcgtgcagggcctagcctgggctaaggagacataaattaagggggttgctgggaagatggggctgtgtagagagcagattggtcagggcatcgtcggggcagagcctagaataaaacgcagtgcctaactttgtggtgtggggcctgaactgaagaattgtaggttgggggatcatgcacaattgggcggagccaggcctcggagggtggagtgcgttttgcgggggatccactgccaggaagctgattagctccggagtgaaagtggaacccgggctggacttgcctcccaccaccacctacaggtgtatagcagcatggagcagctgtcgcagcacgagcccaagaccccagtagcagctgcagggagcagcaagcgggagccgagcaccaagggccccgaggagaaggtggccggcaagcgggaggggctgggcggcctgaccctgcgtgagaagacctggagagggggctctccggagatgtgagcaggggaatggcggagtttgggggcggggtcgaagggggcgtgtcttccataaccacgccccctccatgcagcaagcgattctccgcgtccgaggccagtttcctggagggagaggccagtccccctttgggcgcccgccgccgtttctcggcgctgctggagcccagccgcttcagcgccccccaagaggacgaggatgaggcccggctgcgcaggcctccccggcccagctccgaccccgcgggatccctggatgcacgggcccccaaagaggagactcaaggggaaggcacctccagcgccggggactccgaggccagtgagtgccctatcgtgctgccttccccaatcttccccaatgtcctactggtcatatagtgagcatcccacgagcctggtgctgtttatgaaagatctcaggtcctattcacattgcaatttgggatttttttttttttttttttttttgagacagagtctcactccatcacccaggatggagtgcagtggcgtgatctcggctcactgcaacctccacctcccaagttcaagtggttctcgcacctcagcctcccgagtagctgggattacaggcgcgcgccactacccccggctaatttttgtatttttagtagagacagggtttcttcatgttggcaaggctggtctcgaactcctgacctcaagtgatctgccttccttggcctaccaaagtgctggggttacagtcgtgagccaccacacccagcccaatttgggattcttaacattagaaacaccccaataccatggtcagtcagtgatacagaccgatacagactatgtctctatatgaggagcagtgaggcatgcaggttacctgctcagatgaaactcaccatccatcaagggtaaaaagtggaaagagcattccaggcagggaaacagtatgtgggaaatccctggccttggactaattcctaacacacttgctttctgttgcagctgaccgtccacgcccaggtgacctctgcccaccctcgaaggatggggatgcatcaggcccaagggctaccaatgacttggttctgcgccgggcgcggcaccagcagatgtcaggggatgtggcagtagagaagaggccttctcgaactgggggcaaagtcatcaaatcagcctcagccactgccttatctgtcatgattcctgcaggtaatgctgggccccacctggcaggggaggggctgccccccatttgaggcaggacagaccaatgaaaatgctgcattttccctgtccaccgtgattggctccaggctggaccaatgagaggctgctctgccactgccttgggaggagggaggagcagatacagggagatgtctatcttcttggttctgatttctgaccatggttgtgtgtctgtagtggacccacatggaagttcaccccttgctagtcccatgtctccacgatctctgtcctccaacccatcctcacgggactcctcacccagccgggactactcaccagctgtcagtgggctccgctcccccatcaccatccagcgctcgggcaagaagtatggcttcacactgcgtgccatccgtgtctacatgggtgacacggatgtctatagtgtccaccacattgtctgggtgagtactcatgggtggagtctccatcacagagtggagggtggtggggaaaaggcccctccagctcaaaccagttagcctgggtgagacacctctgtgaccctctatgcctcttccctctctaaacctgtttcttttttcttttacttttttattttaggcggagactcactgtgtcgccaggccggagtgcagtggcaggatctcggctcactgcaacctctgcctcctgagttcaagccattctcctgcctcaaccttctgagtagctgggactacagacaggcgcgcgccaccacgcccagctaatttttgtatttttagtagagacggggtttcaccatgttggctaggatggtctcaatctcttgacctcgtgattcacccacctcggcctctcaaactgctgggattacaggcgtgagccacggtgcctggccgagactgtttcttcatctgcaaaatggggagaataggccaggcgcagtggctcaggcctgtaatcccagcactttgggaggctgaggtgggcagatcactggaggtcaggagtttgagactagcctggccaatatggtgaaaccctgtctctattaaaaatacaaaaattgggccgagcgcggtggctgtaatcccggcactttgggaggccgaggagggtggatcatgaggtcaggagatcgagaccatcctggctaacatggtgaaaccccctctctactaaaaatacaaaaaattagctgggcatggtggtgggcgcctgtagtcccagctacttgggaggctgaggcaggagaatcgcttgaacccgggaggcggagcttgcagtgagccgagattgcgccactgcactttagcctgggcgacagagcaagacaccatctcaaaaaaaaaaaaaaaaaaaaaaaaaatggccaggcgcggtggctcacgcctgtaatcccggcactttgggaggccgaggtgggtggatcacgaggttaggagtttgagatcagcctgaccaacatggtgaaaccccatctctactaaaaatacaaaaaaaattagccaggcgtggtggcagatgcctgtaatcccagctactcaggaggctgagacaggataatcgcgtgaacccgggaggcggagcttgcagtgagccgacatcgcgccactgcactccagcctgggtgacagagcgagagactccgtctcaaaaaaaaaaaaaaaaaaaattagccggaggtagtggcgcatgcctataatcccagctacttgggaggctgagggaggagaatcgcttgaacctgggaggcgggtgttgttgcagtgagccaggattgcgccacagcactccagcctgggtgacagagtgagactccgtccaaaaaaaaaaaaaaaatgtggggggaggaataataactatttcacaaggtgttatgaggattctaatgcatgcagagctaagtgtcctgcatataagtttaggagctttccttgttaccaatcccactaaccctgtccctatggggtgctcttttcccagcatgtggaggaaggaggcccagcccaggaggcaggactctgtgctggggacctcatcacccacgtgaatggggagcctgtgcatggcatggtgcatcctgaggtcgtggagctgatccttaaggtgagtgcagggaaggaggcaccctgggcggagggtgggggaggcctgagcagcccctagcagagcattttcccgcattcttcccccagagtggcaacaaggtagcagtgaccacaacgcccttcgaaaatacctctatccgcattggtcccgcaaggcgcagcagctacaaggctaaaatggctcggaggaacaagcgaccctccgccaaggagggccaggagaggtgggcacagccgtaaacagcctggtctttgagcagtgggtggaacttaggcgggaggggcacagatgaggatggagaagggaagagcacgggaaaggtggcgggaacaaatgaccaacaagcaaagggaagaggacaattaagaggggctgcgggctgggcgcggtggctcacgcctgtaaccccagcactttgggaggccgaggcgggcagatcacgaggtcaggagtttgagaccagcctggccaatatggtgaaaccccatctctactaaaaatacaaaaattagcctggcatggtggcgctcgcctgcagtcccagctacttaggaagctgaggcagaagaatcccttgaacccgggaggtggatgttgcagtgagccaagattgtgccactgcactccaacctgggcaacagagtgagactccatctcaaacaaacaaacaaacaaacaaacaaaaaaagaggggctgggatgagtcacacctgtaatcacagcactttgggaggctgaggcagaaggatcacttgagcccaggagtcaagattaggggcaacatagagagaccccatctctacaaaaaacttaaaaaactagttgggtttggtggcacacacctgtggtctcagctactcggaggctgaagtgggaggattgcttgagcctgggaggtcgaggctgcagtgagctatgatctcaccactgcagtccagctgtgacaacagagctagactctttcaaaaaaaaaaaaaaaaaaaaaaaagaggggctgtaaaagtggaaggagccaagaatggaagctgtgccaaatttctaggatcagagaaaagcattgtaggagggtcttgcacatataggcaggcccaggagatgtgaactggaaagggagatgtccagagacggagggggtccaggagatggtcctatcctgttagatgtgtttagacagaactgggaaaggctagaataagaaatgtctatctggaatgagcatgccaggcaaggttcagccaactgaaatcctattttcccttatagataggaggagctaggtgggaggtgggtggggccagaagggtattctgtttgtttgtttgtttttagtattctgttttgatcagtgagtttggcccagacaagtacagggatttgggtgagaggagccagacggggttgagataagtacatttcttcccactcttataggtgggttgtagtggaagaggcgggactagaggcaggtgggaccaagttggttttgtttggatgtgtttctagcctggactgggagtggccaaaaggttgggcaggacctgaagtgggaggagggaggagccaagcagcactgagttaagggaagttctgtcttgataggtgggttgtagtgaaagacggagggactagaggggtgggcaggactagaagaggttgtttttggccgggcgaggtggttcacacctgtaatcccagcactttgggaggccgaggtgggtggatcacctgaggtcaggagtttgagaccagcctgaccaacatggtgaaaccccatctctactaaaaatacaaaaattagctgggagtggtggctcactcctgtagtcccacctactcaggaggctactcacgaagctgaagcacggtaatcgcttgaacccgggaggtagaggttgcagtgagccgagatcgtgccattgcactccagcctgggcgacaagagcgaaacttcgtctcaaaaaaaaaaaaaaaaatggttttgtttggatgagtgtttgtagccagaattgggagtggcctaaagttgggcggggcctgaagtaggaggagctaaaggaagttctatcttgataggtggattgtagtggaagagggaggagctagagaggtgggcggggcagaacaggttggttttgtttggatgcttgtttctagcttggactaggagtggccaaagggggtgggtggggactgaagtgggaggagccaagcagcactgagctaaaggaagttctttatcttgataggtgggttgtagctggagagggaagggccagaaggggtgggtggttaccgttgtgaggccgtgaaatgggaggagccctgagctctggcgtccaggtcaaggacgcttggccccctccctgtcccgcagcaagaagcgcagctccctcttccggaagatcacgaagcagtcgaacctgctgcatactagccgctcgctgtcgtcgctgaaccgctcgctgtcatccagcgatagtctcccgggctcgcctacgcacgggctgccggcgcgctcgcccacgcacagctaccgctccacgcctgactccgcctacctaggtattacctcctgcacctgcgcggggaccgagcagcgcggggtggcctggctggtgcttgggctgtactcactcgcttcacctcctgtctcccgcaggcgcctcatcccagagcagctccccagcctcgagcacgcccaactcgcctgcgtcgtcggcgtcgcaccacattcggcccagcacgctgcacggactgtcgccaaagctccatcgccagtaccgctctgcgcgatgcaagtcggccggcaacatccctctatcgccgctggcacacacgccgtcccccacgcaggcgtcaccgccgccactgccgggccacacggtgggcagctcgcacactactcagagcttcccggccaaactgcactcatcgcctcccgtcgtgcgcccgcgccccaagagtgccgagccccctcgctcgccgctcctcaagcgcgtgcagtcggccgagaagctgggagcctctttgagtgcggacaagaagggcgcgctgcgcaaacacagcctcgaggtgggccacccggatttccgcaaggacttccatggcgagctggcgctgcatagccttgccgagtccgacggtgagacgcccccagtcgagggccttggcgcgccccggcaggtcgccgtccgccgcctgggccgacaggagtcacctttgagcctgggcgcggacccgttgctgcccgagggtgcctccaggccaccagtgtcgagcaaggagaaggaatccccggggggcgccgaggcgtgcaccccaccccgcgcgacgacccccggtggccggaccctggagcgggacgtcggctgcacgcggcatcagagcgtgcagacggaggatggcactggcgggatggccagggctgtggccaaggcggcgctgagcccggtgcaggaacacgagacaggccggcgcagcagctctggcgaggcgggcacacccctggtacccattgtcgtagagcctgcgcggcccggggctaaggctgtggtgcctcagcctctgggcgcggactccaaggggttgcaggaacccgcacccctggcgccttccgtgcccgaggccccccggggccgggagcgctgggtgttggaggtggtggaggagcgcaccacgctgagcggtcctcgctccaagcccgcctccccaaagctctccccggagccccagacaccctccctagccccagcgaagtgcagtgcacccagcagtgcagtgaccccagtcccacccgcatccctcttgggctcaggcaccaagcctcaagtggggctgacctcccggtgccctgctgaagctgtgcccccagcaggcctgaccaaaaaaggagtgtccagtcccgcacccccgggaccatagccaagggggtcatcggccccgcgctgtacagcctccgtatacatatgtacacatataaataaagtgcgtccgtgctgcgtgagttttctggggctcactcctctccaggcaaggcgagacatcacacgaccccacccccatgcccaggtgctttttgggaggtgggactccagttctggttaccatggagagtggagggaattttggatagacacctcctgtggtcccacttctggtctcacctctgcaccaactgcccccaaacctttagggggagaattgaagctgcgatgctcttgtgtcccagcgcccacctgaagagaaggttaacagcctcgtccaccaatttccatttatttactcctcaacaatcctgatggcaggtattatgtttcccattttgcagacaggtagactgtgtcacagagcggttaaggcacacaatcaaggtcatacagctaggaaggggatgaactgggattcaaaatcaagtccaaactggttcctgagcccttagattttttattttttatttttttgacacagagtctcattctgtcacccaggctgaagtgccgtggtgttagctcagctcatgacaacctctgcctcccgagttcaagcgattctcctgcctcagcctcccgaggagctaggaccacagacgcgtgccaccatgtctggctaatttttaaatatttttaatggatatggggtttcaccatgttggccaggctggtctcgaactcctgacctcaagtgatctgcccatctcagcctcccaaagtgctggggttacagatgtgagccactgcacccacccgtcccccgccccccctttttttttgaaacagagtcttgctatgtgacccaggttggcgtaatcatagttcactgtgaccatgatctccctggttcaatcgatcctctggcttcagtggctgggactacaggcatttatcaccgtgcctggctaactttttttaagttctagtagagatgtggtctcactatgtagcccaggctggtctcgaattcctgagttcaagtgatcctccctccttggcttcccaaagtgctgggattacatacgtgagccactgcacctggccataagggttagatcttataagctctgctgggcttcctggccatgccattacagggctggtagttcttcaccagcggctggaaggctttccagagggctggcagctgggcacacagtgtgcccccaccccgttgctcctctccctggttccgattcatgtcacccacgcaggtccagggcccttttggggacacgcaccatttggagtggtcctctgtgctgttgaagcttgggccggctggtccagggaaagctatctggttcacattcagaacctgccagatatccgagcagttagagggcaggatgcctacagttttgtgccagaactggacctgcaggttggtaccaagggctgctgccaaccagccggagtacaggtctgcaaaggatggagagagggcacaggtagggtcagggccactgcgagggagtccctagtccacttcccctctctcagctcagtttccatatttccttttttttttttttttttgacatggagtcttgctctgtcgcccaggctagagtgcattggtgcaatctaggctcattgcaacctctgcctccgaggttcaagtgattctcctgcctcagccttctgagtagctgggactacaggcatgcacaaccatacccggctaattttttaataaagaggggtttcaccatattgaccaggctggtctcaaactcctgatctcaagcaatccgcccacctcggtcttccaaaatgctgggactacaggtgtgtgtcaccgcgccctgccacagtttccatatttctgagctcagttgtcaattcccagtcctgggaatgatgacattaatattaattgcccttcccaaatttgtttttgagacagagtctcactctgtcgcccaggctggagtgcagtggtgtaatctcggcacactgcaacctctgcctcctggtttcaagcgattctcatgcctcagcctcctgagtagctgggattacaggtgcccgccaccacacccggctaatttttgtacttttagtagagatggggttccaccatgttggccaggctgttctcaaactcctgaccgtgtaatcagccagcgccctccaccatgcccagataatttttgtacttttagtagagatggagtttcaccatgttggccagactggtcttgaactcctgggctcaagtgacccacccgccttggtctcccaaaatgtggggattacaggtgagccaccgcgtccggccctgagtgtttttaattaattaacttatttattttgagactgggtctcattttgacaccccagctggagtgcagtggcaggatcatgactcacttgcagcctcgacctcctgggctcaagctgttctcccacctcagcctcctgagtagtggggactacacgtgtgtgccactatgccccactaattaaaattttttttgtagagatggggtcccgctgtgttgcccaggctggtctcaaactcctgggctcaagcaatcctcctgcctcgactgggattacaggtgtgagccactgtgcctggcctatttatttgtatttatttatttatttatttattttgagacacagtctcactctgtcacccaggctggagtgcagtggcactatcttgactcactgcaagctccaccttccgggttcacgccattctcctgcctcagcctcccgagtaactgggactacaggtgcccgccaccatgcctggctaatttttgcacttttagtagagacagggtttcaccgtgttagccaggatggtctcgatctcctgagctcgtgatctgcccacctcagcctcccaaagtgctgggattacaggcatgagccactgtgcccagcctatttatttatttttaaataaagacagggtcttgctctgtcacccaggctggagtgcagtggagtcattatagctcactgcagtctgaaactctgggctcaatttatcctcctgcctcagcctcccaagttgcttggctaatttttaattttgtagagatgaggtcttgctatgtttcccaggcttgtcttggatgcctgtcttcaaatgatcctcctgcctcagcctcctaagtaactgggattacaggagtgaggcaccacctctggcacccaaatgacttacaggtaccacttcattcacaattttttaagtagatgtcagtatccccatttttcagatgagtagaccaaggctcaggtgaagttatacatcacacagcaaaacccagggtttgaacccaggtctgttcactgatcatgtgattatagctcccaaacagacctggtctctaccgctgacttgaactcagccatggccacaccagtcaccctgtctgcagagaaggagctctccaaccctcaaccttgagactcaccatctccaaatttgctgaacttggcaaagctctggaaaacagccccggcctgggatgtgagtgtgatgctgctgttccagggttcttggctaacgtggtggcccttgaccacattctccaagtcggggaattcctgggcaaagatcccttccagctggtagttatagacccaggggtaggtgtaggtcagctgcttgcctggaggacaaggggaggaggaaatgcaagatcgttccaggttctggtcagtaaacccaggactcatcctgtgtccctgactcgacttacccatcttcgagaactgagcgaagggaaaagacacacagagcagggtctgcccgtaggtacaggcgctatgaggccagctgtatgcagcagaggaggccggtggagggaagttaggtacactgtggaccagccagaagcccccatcgtggtcaaggagcaggacacctggaccaaaagaaggcattaggggaggtcgggcgcagtggctcacgcctgtaatcccagcactttgggagaccgagacacacagatcacctgaggtcaggagttagaaatcagcctggccaacatggcgaaaccccatctctactaaaaatacaaaaattagctgagcgtggtggtggacgcctgtaatcccagctactcaggaggctgaggcaggagaatcgcttgaacccaggaggtggaggttgcagtgagctgagatccaccactgcactccagcctgggccacagagcaaaatttcatctcaaacataagtaagtaagtaagtaaataaataaataaataaataaataaataaaaatttaaaaaaagaaggcaggccccacgcagtgtaatcccagcactttgggaagccgaggagggcggatcacctgaggtcgggagttcaagaccagcctggccaacatggagaaacctcatcactactaaaaatacaacattagccgggcatggtggtgcatgcctgtaatcccagctactcgggaggctgatgcaggagaatcacttgaacccaggaggcggaggttgcagtgagccgagattgcaccattgcactccagcctgggtagcaagagcaaaactccttctcaaaaaaaaaaaaaaaaaaaaggcaattagagggtattgctccaggcctcccagcaagctcatctgcaatcaggaacaccctcagtttgcagcggggcttagagagggtgccagcagtgttagaaccacagctgagctcagtttttgcaggcataaattcttatagtccagaataacgccaagagtaatgtaaggtagggaaacaggccaggtgtggcggctcatgccggtaatcgcagcacattaagaggccaaggtgggtggattgcttgaaccaggacttagagaccagcctaggcaacatggcaaaagcccactctacaaaaatacaaaaagtaggccaggtgtggtggctcacgcctgtaatcccagcactttgggaggccaaggcaggtggatcacctgaggtcaggagttcaatatcagcctgtccaacctggtaaaaccccatctctactaaaacatacaacatttagctgggcatggtggcgcacacctgtaatcccagctactccagaggctgaggcagaagaatcgcttgaactggggagatggagattgcagtgagctgagattgcaccaccgaactccagcctgggtgatggagagagagtgccgcaaaaaaaaaaaaaaaaaaaaaaagccaggcgtggtggggggtaccggcaggcccagtacttgggaggctgaggtaggaggatcacctgagccctgggaggtcaaggctgcagtgagctgtgatactgcactccagcctaggtgactgggtgagaccttgtctaaaagaaaataaaataggggaaatagatgcccaaggtctgacaggggagatctcccaccccactatggaggtcaggggttagcttggaaaaatgcataggaactcggctgggcagggtggctcattcctgtaatcccagcactttgggaggccaaggcgggtagatcacttgaggtagaaaccaggagttcgagaccagcctggccaacatggtgaaacctcgtctgtactaaaaatatgaaaattagcctggtgtgatggtgcgcctttaataccagctacttgggaggctgagacaggagaattgcttcaaccccagaggcagagattgcagtgagccaagattgtgccactgcactccagcttgggtgacagagcgaactcccaccgtctcaaaaacaaagaaaaaaaaaagttggggggaatagatgcccagggtctgacagtgcagatctccccgaccaccccatgcacgtcaggggttaccttggaaaaatgggacccgagtctctccccagcccccaatccaggcctcacccttcgtgtgcccacgcatggaagagtcctgagccttgctgggttgaggcggttggtcattgtagagcaggaaggcgagctgcgggcggataaacggaggcaacgtgaaattcctcccaggcagggcagccctagagtttcgcccctagttggcccggggcccccttcacctggctggtgttgctccggtacagcggctgcaggcttcggcccacggccccctccgggctgttgatgagtgccctgccgtcccgccagcctccggagctctcgtccagatacttgtactgcagccctctctgcgccgcctccccggaccctctaagagctggcagcttgtagaccacgaacctggaggtcggagaatgcacagaaataggagagagggaagagaaggcaccccagggttccccgaggaggtagccatcccggttgagtgaccgcagccggaccccggggcgatggtaggccccccgctgcgcactcaccagtctacaggctgcccggagtccccgtagcaggtcagggccccggcggggacgcacagcagcgctgccagcagcagcgggatcatagctgctatggggctgagatccaggaatctgtgtcgggactgcggggcgctgggttacatcagaggccaggactggcacctggcgcctttcacttccctaaacttgcctgggaaccggggcggggacatcacgagggtacagactcctcccccgagacgcgatgctgcgttttggagaggcaaaaggcaacgctgagtctgcccagaccacgcccacgacgggcccggcgctccagcgtctcctggagcctggccaccgttccttttcgtggtagctaatcccagcccacgctcttctgtctgacccaactcccgcccgggtttctggatcaggcacaagtttgtattttattttttattccagccctacaacctgggtccaactcttgggacctttgttcttcctctttttttttttttttttttttttttttttttgagacggagtttcactcttgtcgcccaggctggagtgcaatggcacgatctcggttcactgcaacctccgccttcctgattaaagcgattatcctgcctcagcctcccgagtagctgggattacaggcgcccgacaccacgcccggctaatttttgtagttttagtagagacggggtttttccatgttgactaggctggtctcgaactcctgacctcgtgatccaccagcctcggcccccgaaagtgccaagattgcagaagtgagccactgcgccccttaagaagcatttgtgttccagtgtatcttcccctttttctttctttttttttttccttccttttttttttttttttttcccggacaatatctcgctctgttgcccaggccggagtgcagtggcgcaatcttggctcactgcaacctctgcctccccagctcaagtgatcctctcacctcagcctcccgagtagctgggatcacgggcacatgccactatgcccagctaatttttgtagttttttttttgaaacacggtttcaccatgtggctcaggctgaactcctgagctcaagggatccacctgtcttgcctcccaaagtgctgggattacaggcatgtaatccacgccacccagactctcctttttcattctgcacgttttctccaggatcccctgagctagcaaagaggtgactgtatgtttgttttttgtcgttttgagacaggataatggtttctcacccaggctagaatgcagtgactccatcacagttcactgcagcctcaacctactgggctcaagagatcttcccaggtagctggtactacaggcctgtgccaccacacccagataattgttcattgcagagatgagggtctcactatgttgcccaggctgctctggaactccggggttcaagtgattctcccacctcagcctcaaaggatcatggcagggcaaagggctatgggaatctgagtactggcttgaaactgcctttgcaaaaattatgacagaaaattatgtcagtgaaagagctctgacctaaccaactccatcttgcctttaatctccaaactgcccttgcttggtcattcctggagtggggtcaagctaactttttttttttttttgacacgttgtctcactctgtcgcccaggctggagtccagtggtgtgatctcagctcactgcaacatccgcctcctaggttcaagcaatcctcctgcctcagcttcctgagtagctgggattacaggcatgcgccacatgcccagctaatttttgtatttttggtagagactgggtttcaccatttttggtagagatggggtttcaccttggggctcaggctggtgtcgaactcctgggctcaagtgatctgcccgcctcagcctgccaaattgctgggattaaagagggagccaccatgcctggccccaagctaattttgggaggaatttagtttatagcttaaatgataatagcccttccccaaactaaactgcctttgtagaaataatgaaagggcactaggttaggaggatgagaggagcctgaattctgctaaactgtaggtgtagtagttaaattatgaccagccatttttccggccgggtgcggtgcctcacgcctgtaatcccagcactttgagaggccgaggctggcagattacctgaggtcaggatttcgaaaccagcctggccagcatttcgaaaccccatctcttctaaaaatacaaaaattagcccggcatggtggcatgtgcctgtaatcctagctacctggtaggctgacacaggagaatcacttgaacccaggaggcagaggttgcagtgagccaagatggaacaactgcactccagcctgggcaagagcaagactccatctcaaaaacaaaaacaaagatggccagccattattctggaggtcacaaggtttgcaacttccccagttatttctgcaaataacatgactattgcaaaacctaacgctggcctttttagatgtctttttaggctttttgcatatctgacaactggatgactccacccagactagcgactctatggtccccacccagaagctgactcagcaactgttttccacagctccaggattgcagcaaggcacccattccctagccctcctgcccaccaaactgttcttgaataaccctagcctctgaattttcagggaggctgattcaagtaataaaactcccatctcccatttagctggatgtatgtggattaaactctctctattgcaatccctctgtctcgataaattggctctatctggacagtgggcaagatgaaccccctgggcagtcataggctgtgaactcttaaatccagggagatgtttgctgtcaatgtccgcagggttcaaggcagaagacaaggacagtgtagcctgaactgggtgggaaaagagaggacagcaaggcctccagtgcccaagggggcttgttggagttgaggggtgtcactgtagtttaggagatgagggtgtgtaaggccctctaatatgacctctaggtttacagcctcctgccatcttccagcctccaaaacccaaaaattcaggccaacgctgaagctttatctgggaggggcatttttataggacccataaccattgacagttaatatcagccacaataagggaccttcaggagccgctttctagacccagggtctctgggaagcctcatcccacaccctctcctgctgtccagggccatctgggagctggtctgagtgtccactgagtccgtttatttggcggtctgtctcactgggtttgcacgacagtttggacatctctgtgtggctccctgtggctgaaggcttgtcggattttccgtaagaggctcccccagggctgtctatgggtccgtgtttgatatttgggtggatctttgggaacgcgagtccaggagagggtccattcgtgggaaaaccacccagcattgtgtcacgcgcgtccgtgtgaagagaccaccaaacaggcttcttgtcccatccccagtcactaggagagtccaagtgccagggcagggctcaaaggtggcgcttcatgtgcaaggccaggtggtcagagcgcgaaaaagcacgtgggcagagctggcagcggaaggggcgctgccccgtgtgtttccggtagtggcgggtcagctcgtccgagcgcgcgaatctccagccgcagccttcccacgtgcaggcgtatggcttctcccctaggggacaaggaagccataagcgccactgtctgcccagtcatgtccccgggtcccctgcatctggccacacccctttactcagcctgggctgggactaggatgaacaaagtgaggcccctagggcacaaaatttaaggaggcactcactctcagaggccagccaagtccaagtcccgccctctgcaacccttcttcccctgtaactacagcgggcgccgcgccctttctcatgtccggggccccgccccctcacctgtgtgcgtgcgcagatgcgccttcaggtgggagctcttggtgtagctcttgccgcaacccgggtgcgcgcacgtgtgcgctgcctgcctcttgcgcgcccacgaacgtcggcctcgcttggatggcgcggtctcggctatcacacctggatcctctgcagtccccccgagtccagtgcccaccgtcccgggtcccaaacaactcaggaaggagggggacgtggcgggaccgggcgcgggtccctggagcccgcggaagagctggaagtgcccttggtactgaggcgccgggtacatcgcggggtacccggacagtagcccgtagggggcgcccgacgccgcaggcactgaaagcccggtccgcgggaagtagccacccgaggagccggcgccgggccccgggtacaccggttgcagcgccagcgccttgggctcgggggccggggctggagccagggctgggcccacgaaggcgtcgggagcccgggctcgcagggcagggcgcacccaacccgagtgatcctccgaacccaaaagcccagccaccagccccgggccgccagcatatgcgcccagagtctcgggcggcggcggatattgcgccccggaggcctcgctgggcgccagagcgcaggtctggggcgcgccaccgggctccgggcccgagaagttggtgaggaggagatccaggtcccaggtggcgtccgcgcccctctcatcgtcctcttcctccccgggctggtcctcagacttcacgtggaggggcggctccgtggggtcaggaggacccgggcccatgtcctgcgcctcttcggagcgccaccactgcgggagggagcaggcagctcgaggttcggtggacactggggtgccctgcccagggacatcgcgggctggacactctgacgcagaggctttggaaaggggtcttgtttgcctgtctgtctgtcccacttccccaacactgcccctctaaccgcccctctccccgctccccccccagctccagggacagaaaccgatcaggtctggctggagacaggagataagacttccactatctggaaccacactcggggatgggggaaggggtagcagagctgctggagatggaaaactggcaggggacgggggagaggatgccagccttgacttagttttcccccagaacatccctctccttccctgtctcccaaaacaagattaattccgaaattttggatgtcccccagacacactcatcatttcccgctgatatctggaagattgtctgtgagcctagatctcgttcctttttttttttttttttcttgagatagggtcttactcttttgcccaggctggagtgcagtggtgcagctcactgtatccttaatctcctgggctctaatgatcctcctgcatcagcctacggagtacctgggactacaggcacacgcccccatgcctggcctaatgtttttggtattttttgtagagatagggtttcaccatgttgcccaggctaccttcgttttctattaccgaaatagatcacacttagaacctcaaacccctagaccaccctcctcaccccctgccagactaagctgagatctcctctcctggactgagcgtacctcagtcctggttaagtctcttgatttcaggtcaagatgcaggtctggaccccaagatctgtgactgtggccctggattccagccagcccacctagaccccaccttctaggccccaccttgaggaagtcatcctgtgtgtccgggaaggggcccagggcggtcagtgtgctgatggagggcaaggcggtctcggctgtggccatggctggctggtgcccaccctgggcctcaagcctcctcttcctcggctgcctcgtgaactctgaggctgtgatagccccttcgagggctcctctctgtccttagctgattggctgcagcctctgataaggcaaagcaaggcaaggcggcgggggggcactgtttctggggcacaaacttcacgttggcctgtctggggctggggttaaagactaaccctgtgtccaaagccaagtcaaatatcaagggttggggggttcagggtttgagggtccaggtgctgggtaaaaacagacattgggtctccaaagaaggagagacttgggggtcttccctcagttaactttcctggaaaaggcagaaagggtattctgggaagaagctgtgggaccccctgtccccctgattgaggctccacagccctccccctccccagtaaacagcaacaaccgtgctgatggcgggacttggcacgagctccccgccaagcattatcagacaccccagacgttggaggctgctatcaggtgggggcccaggccagctagagctctgtcctccggtgaaggggagggctgggagttgggtcttcaaattagcctggcgttcaatttgcctgggttgggacctcccagggtctcagccctgcagcaggaggaagcccctgacaactggcccaccattgtctactggggacccttgggtggcactgcatgggactgcatggaggctggttcagtgccagctgctttagtgcgatgggggcagccaagggaaaagtgaccctctctcctcctgggtgggataggaccgttggatcaagccacaggcagtacctgacctgcaggagaccagtgccctggctctgggcctggctgctccttgattctgcccaacatgaggagaggatctgagtttctacaacaggaacctccactctggtgccctgggagcctgggaaggggacatggatacgtattacagacacataactcatagtcactcattggaagactgaggcaggaggatcacttgacaccaggatttcaagaccagcctgggcaacataaaacctatctctccaacaaaaagctgtgagtggtggtgcatgcccatagtcccagctactcaggaggctgaggtgggaggattgcctgagcccaggaggtcgggactgcactgaactataatcacaccactgcagtccagcctggggcacagaaagcaagactctgtcgctggaaaaaaaaaaaagttgggtggccatctttattcctggcagatcaacctgggtgacacaaacaaaaacaaggccaggtgcggtggttcacacctgtaaccccagcactttgggaagccaaggtggggagatcacttgaggtcaggagttcgagaccagactggccaacaggatgaagccctctctctgctaaaaatacaaaaattagctgggcattgtggcacatgcttgtaatcccagctatttgggaggctgagctggagaactggttgaaacttggaggcatggggccaggcgcagtagctcacgctagtaatcccagcactttgggaggccgaggcaggcagatcacctgaggccaggagttcgagacaaacctggccaacacagtgaaaccctgtctactaaaaatataaaaataggccggggatggtggcatacacctctaatcccaggtacccgggaggctgaggcacaagaatcacttgagcctgggaggcagaggttgcagtgagccaagatcatgccactgcactccagcctgggctacagagtgagattctgtctctaaaaaacaaaaacaaaacaggcttggagcagtgagtagtggctcatgcctgcagtcccagcactttgggaggccaaggtaggaggaatgctcgagcccaggagttcaagaccagcttgggcaacatagcgagatcccatctctaaaaacaaaaacaaaaacacagttactcacaggaccatgcaattacataatgacatgagttcctgttccctcagtcacactgatcatataatccgtgcacatataattgtgtgtctgtctatgtatatggactatgcacagacatacaattcccaggcactaaaacacaaccctatgctatattggttacacaatgtcatagccaaacaatctctaaaacacagaattcataatccacaggcaggcacacagttatacaatcctactgacacaatttagccgtaattgagcagacacacatggggagtcagatacattgtcacagaactttttttttttagatagtgtctctctctgtcacccaggctggagtgcagtggcatgattttggctcactgcaacctccacctcctaggctcaagtgattcctctgcctcagcctcccaagtagctgggattacaggtgcctgctaccacgccacgctaattttttttttttttttttttttgagacagagtttcactcttgttgcccaggctggagtgcaatggcatgatctcagctcactgcaacctctgcctcctgggttcaagtgattctcctgcctcagcctcccgagttgctgggattacaggcacccacaagcaggcctggctaatttttgtatttttagtagagatggggtttccccatgttggccaggctggtcctgacctcaggtgacccaccctccttggcctcccaaagtgctgggatgacaggcatgagccgccccagccagtcaaaacctacactttatacagtcacaccaccggtcacttttacaatatgtaaagtaattatttagtcacagttgcatagctaccagtgcccaaccgtaggggatgcacccagttaaacacagacaaacgcaaggacatggcatcacaggtcctgagaatcaagacacacacatttctcaacagatacacaatcagaatgggtgcaccacaaatgcactacacaaaaagacaaaacaggcggggcgcggtggctcacgcctgtaatcccagcactttgggaggccgaggtgggtggatcacttgaggtcaggagtttgaggccagcctggccaacatggtgaaacccgtctctattaaatataagaaaaaaggccaggcatggtggctcacacctgtaatcccagctactcaggaggctgaggcaggagaattgcttgaatccagtaggcagaggttgcagtgagccaagattgcgctactgcactccagcctgggcaacagagtgagaatccgtctcaaaaaaaaaaaaaaaaaaaaaaaattagccaggcatgatggcatgcttcagtggtcccagctacttggaggctgaggtgggaggatcgcccaggaggtggaagctgcagtgagctatgatcgcgccactgcactccagcctgagcgacagaacgagaccctgtctaaaaagaaaaaacaaaaacaaaacaaaacaaccacatagactcacagaatcacacaagttcacacacacacacacatacacagacacagacacacacacacacacacacacacacacacagagtcacaagtatctacatgtgcttcctgggacagactggcagaaaggtttgctaagatcgcccacttggagctcgtcttccccacaaccagcacccaattagagaactcgagtctggcctcctgggttcaggaggacgcctagtgctcgcgccagaatttctttgtttaattcttgactccctccgcacacaccccctgcaactgaccaaccaggagtgggccgagccctttcctacggccaataagaggagaaacccagctggccaatcggtttcccgcactcgtcttccgcccctaccccgtccgcttcttaaaggggctagcctatctctgtctgggccccccgatttccacaggcaaggctaccttagcccttttaaaaggcagagctgcggagggggccggattctaggaggaaccaatgaaaagcctcactcggcctccgctcctcccacttcttgctgaggtcaaaggcctgcgtcagttgcactgtagcctcggcagtgaaccgggaggtactaccaggtaaggaaggtgcggtagccccagccgtgggtgagaggagctccgctctgacacccccgctcctgtaggtcgccgtcgttgctccgctcgctctgagagagcatggccctgagaggcgtctccgtgcggctgctgagccgcggacccggcctgcacgtccttcgcacgtgggtctcgtcggcggcgcagaccggtcagtgtggggtcgggagtgtggagggaaggagggaggaactgggggtttagggactttccggggtgactttcccgttctgtgcttgcagagaaaggcgggagaacacagagccaactggctaagtgtaaggacctctggtcgcaccgtgtgtctgctgcccctgttcagctgtctgtctgccgcaggtggactctgtcccagaatccgagagctgcccgagcggggtggcagggtcgtggccagggtcagaggcactaaggcagtgagtgcgctgtgcctgcggggccggagaaaagtcacctgatcagtctcgcttgcagctcgcactagccggggggcgacatgggtgttggggggtagggctgatgagggtccgagaagggagggcacagtgatcttgcggactggaccgaggcgaattccccttcccagcctcgcgtcccgagtttgactggcaggacccgctggtgctggaggagcagctgaccacagatgagatcctcatcagggacaccttccgcacctactgccaggagagactcatgcctcgcatcctgttggccaatcgcaacgaaggtgggcgggctggtgggtgccctgagactgctcctccgcctggagccatagccaccccacctcaaggcccctctgtccttggggctggggcttcctgtggcctaggcctgggcctgaatttgggcactggtccctttgcagtttttcatcgggagatcatttcggagatgggggagttgggtgtgctgggccccaccatcaaaggtaggaacaagtatctctccacacactgcagaaccctctgtattctgaaagcctcttcctccttccctccctccctttcttccttccttctctttcttttcttttccttttctttcctttcttcttcccccccaacagagtctggctctgttgcccaggctggagtgcagtggcacgatcttggctcactgcaaattctgcctcccaggctcaagcgattctcctgcctccacccctctagtagctgggattacaggtatgtgccaccatgcctggctaatttttgtatttttagtagagacagggtttcactgtgttggccaggctggtctcaaactcctgacctcaggtgatccgcccacctcagcctcctaaagtgctgggattacaggcatgagccaccacgttcagccttctttttgagatggagtttcgctcttgttgtccaggctggagtgcagtgatgcaatcttggctcactgcagcctccacctcccgggtttaagtgattatcctgcctcaggctcccgagtagctgggattacaggcgtccgccaccacgcctggctaatttttgtatttttagtagaggtggggtttcaccgtgttggccaggctagtctcgaactcctgacctcaggtgatccacccgcctcagcctcctgattacaggtgtgagccaccgttgcccggcccttttcttttttttttttttttgagatggagtttcgctctgtcacccagcctggattactggattacagtggtgcgatcctggctcactgcagtttcctcctcctaggttcaagcaattctgccacctcagccttctgagtagctgggattacaggggtgcaccaccacgcccagctaatttttgtattttttagtagaaatgggatttcaccatgttggccaggctggtcttgaactcctgacctcaggtgatccacccacctcggcctcccaaagtgctgggattataaacgtgagccaccgtgcctggcccctttgtttctttttttagagacagggtctcactgtgttgcccaggctgttctcaagtgatcctcttgccttactgaaagcccccttctttccctaagccacaatttcccagtctgtaaagtggggctgttgtcccaccctctgaaagtggctgtggagatgaaatgaataaacctcagctagggccagcttggtgcctgcctccttgtgtgtccttattcagccctgtctcttgggtcttagctgggcagggccctgttctctattgtcctgctttcccctcctactaccaccaggatatggctgtgctggggtttcgtctgtggcctatgggctcctggcccgagagctggagcgggtggacagtggctacaggtcggcgatgagtgtccagtcctccctcgtcatgcaccctatctatgcctatggcagcgaggaacagcggcagaagtacctgccccagctgggtgagtggctgcccatggggcctggtggaaggaagacagtctctgaggtctggaactcaagggtggggctgtcccctgagcctattctgtccctatctcaaagatagcataagtggccacctggacccccgccagaccctgggcttcacctggagatctgatccctggccagcctgactgtccccctctgtgaccaccgtcatctccctatgctttctgtgttccccagtccagcccaaagtttaaagtccaccaggttcctgctggccatttgcagtggctcacacctataatcccagcactttgggagggtgaagtgagaagatcccttgagcccaagagttcgaaaccagcctgggcaacgtaaggagaccccatgtctattagaaaaacaaaaaaaggaaagagcctatgtgacctgcgctaagtggacgttggccctcttccgtggtgtctcggaggtgttcagctgcttcaagatgaagctgaacatctccttcccagccactggctgccagaaactcattgaagtggacgatgaacgcaaactttgtactttttatgagaagcgtatggccacagaagttgctgttgacgctctgggtgaagaatggaagggttacgtggtcggaatcagtggtgggaacaataaacaaggtttccccttgaaacagggtgtcttgacccatggccgtgtccacttgctactgagtaaggggcattcctattacagaccaaggagaactggagaaagaaagagaagatcagttcatggttgcatcgtggatgccaatctgagtgttctcaacttggttattgtaaaaaaaaggagagaagggtattcctggactgactgagactatgatgcctcgtcacctggggcccagtacagctagcagaatccgtaaacttttcagtctctctaaagaaaatgatgtctgccagtatgttgtaaaaaagcccttaaacaaagaaggtaagaaacctaggaccaaagcacccaagattcagcgccttgtcactccacatgtcctgcagcacaaacagcggcgtattgctctgaagcagccgcatattaagaaaaataaagaagaggctgcagaatatgctaaacttttggccaagagaatgaaggaggctaagaagcaccagggacaaatcgtgaagagacgcagactgtcctctctgcgagcttccacttctaagtctgaatccagtcagaaataagattttttgagtaacaaataagatcagattcgcaaaaaaaaaaaaaaacccacaaggccctgtgtgaccaggcctctgctgacctttccacctcatctctggccactcatgtgatcctcccagccagacttagctacttgaaattctccagaagtaccaccagttctttacacatctgttccctctcccagcactgctcttccccacagcctcctcctgcttaactcctcacacccttccagtttggccaactccttcctgattccctgggtccccctccccatcttggcattgtgatcatgactttggggtaacctgtctcttgaaagcagggccagatctaacttagttatgaggtctgactcaggggcgagggtaattttttttttctttttttgagacaaagtcccgctccgtcccccaggctgaagtgcagtggtacaatcttggctcactgcaacctgcggttccccagttcaagcaattcctgtgcctcggcctcccaattagctgggattgcaggtgcttgctacccgtgcctggctaatttttgtatttttagtagagatggtgtttcactatgttggccaggctggtctcgaactccagacctcaagtgatccatctgccttggcctcccaaagtgctgagattacatgtgtgagccacctcgactggcctaattttttgtatttttagtagagatggggtttcaccatattggtcaggctggattttttttcttttttgagatggagtcttgctctgttgcccaggctgtagtgcagtggcatgatcttggctcactgcaacctctcctgcccgggttcaagcgattctcctgcctcagtctcctgagtagctgggattacaggcacccaccaccacatctggctatttttttttttttttttttttaagtagagatggggtttcaccatgttggccaggctggtctggaactcctgacctcaattgatccacctgccttggcctcctaaagtgctgggatgacaggcgtgagccactgcaccccgccacgaggataatttttgagtaaggggatgtatcagggaccaggcagccttgtgactttgtcttgtgcctgcagccaagggggagctcctgggctgcttcgggctcacagagcccaacagcggaagtgaccccagcagcatggagaccagagcccactacaactcatccaacaagagctacaccctcaatgggaccaagacctggtaagggttctgggtggtgggcaggtggtgaacaggggcaaaggggcactggtcagacccctcaccgactgttccatccccaggatcacgaactcgcctatggccgatctgtttgtagtgtgggctcggtgtgaagatggctgcattcggggcttcctgctggagaaggggatgcggggtctctcggcccccaggatccagggcaagttctcgctgcgggcctcagccacaggcatgatcatcatggacggtgtggaggtgccagaggagaatgtgctccctggtgcatccagcctgggggtaagtggcagccactttgggaatgggtgttgggtcacctgcggatgcggctttgtcaggcaggctccgtgctggggacgcggctccctgtgcctgtggagcccacacagtggtgattcttactcagccggactcgctgacgtgctgaaaactgcccccatttggtgaccgtctcgctcatcccggctctgcccgggacacatgggcctgaaccagctcagtcatttgactcacagtgcatcttctggcatccgtcagcctcctggctctgagcatcgaacccagatgccaggctgggtgggactgtgtgcaaaccgagtgagcaggcaccgagcttcagtgccagggccatctgtgatgtgaaccacaacctgagtccccctgcgtggggtggctggggaggaggctttccctgcttcagagttggttctgcataggccctcttggtgtctcttgggtgggcctgaggcgccatctcaaccctacagggtcccttcggctgcctgaacaacgcccggtacggcatcgcgtggggcgtgcttggagcttcggagttctgcttgcacacagcccggcagtacgccctcgacaggtgtgtgagggctgcagtgagattctctgggggtgtggggcagcttgggtttcactctctataccatgggtgactccccagcccccacccaccaggcctgagttccttgctctggaatgaccagtgacgtccttctgagcagctgtgggctgagtcaacggcagggccagggcaagcttgggggcactgaggcagcctgggaaggcgtcctggagcagggggccccaggacagggacggggtgggagagtgggcctcccctcgctcttaccctgccattgcccatgtaggatgcagtttggtgtcccactggccaggaaccagctgattcagaagaagctggcagacatgctcactgagattaccctgggccttcacgcctgcctgcagctcggccgcttgaaggaccaggacaagtaggggctgtgtggtgggggcggggggatggcagcggtggctggaggaccttgtgtccttcctggagagaaaggtccttcctgcctggtggccctggggacctgaaccttctgctgtccctcttgtccttgatgggctgggctgaggacagccccactggtccctcattgggagcttggctgcatcagggaatccccaccccgggctaggtttgcttggagcatcgggatgccaggatccccagtccttgttaccctcatgtgccactcccagggctgcccccgagatggtttctctgctgaagaggaataactgtgggaaagccctggacatcgcccgccaggcccgagacatgctgggggggaatgggatttctgacgagtatcacgtgatccggcacgccatgaacctggaggccgtgaacacctacgaaggtaggagctggacctcagagggctcactgaggcctcagtgtctggggagggggtacagggaggtgggacggggacaggtctgagtccaactccacctatcactaagtgacagtgtgacctggggcgagccttacccctctgtccctcatctggagttactcacatggggactgtggaagtgaagtgcttcatgcagcacacagaggccccatcaggccttgcgaggggctcccagctctttctcccacatgctcgggaggagggatgttcctgagacaggtaagctccgaaggcagcccaggggtgaggcccgactcctagcaggctggtggacgcaagggagtgagcgaagctacacgcaggaatcaacgctccattttgttaagagacaaaagtcatcttcagatgacggtgtttgcaccctgtaactgatggtgatttacatgggggtccagaaccccttgcttggtgggaagacagatgtggaaaaagatacttaaaaaaaaaaaaaaagtgcaaacccagcatgcgctatgtagaaatagagggaggtatgaggaccccccgggcagagatgcttccagacagagagaacagcaaatgcaggaggggtgccttccctgcgcaccttgcaaccccagatcttgtctctatctggcatctggggggtggggggatcctacaaatgtgagaatgaccctgaggacaagcagcgggcgccatgagatggttttatgcagagaagggatgagtcagatttggtgctttaggggctcggcgcagtggctcacacctgtaatcccagcgctttgggaggctaaggcaggaggattgcttgagcccaggagttagaagttatgatgagctatgatcaccccactgcactccagcctgggtgacagagtgagaccctatctatatttaaaaaaaataggtttgtactttaggaagtaaacagaattggctctaaaaaggaggctacaatctgccttctgcttcaaggagctggggaggagcaaaggatgagacaccagggcatggggtgtgggattctctgggagaggcggcttcagatgggcagaggtcagctgaggcaagtgactgctcttccgatgtgctgtccctcctatccctcccgagggtaagaaagggcttgctgtgtttccttggagctcaggggtgctttcagcctctgtggcaaggaagcgtggccaggttgaaaatcaaacatttaataaactgtggggctgggggtggggagaacttgccaagggtggggagcacgaagcctgggcctatggcaggggctggacttgctacattttgggagttcagcacaaggagctttgggtttttgtttttttctgccaagatgcattatagaaccatgaaaaacaatttctcagtgtggcccaaatggtggcctcacagtcttctcctggagactgtcactaaggcgtgagtctcccggcagctgtcagcattcaccatctctgttggtctgtacttctgaagcagtggcctggggatacatgaaaattgattttaaagggaagttgtgagctatgaaaactccaaaccgactctgtattaatcttgtccaggtacacatgacattcacgccctgatccttgggagagctatcacgggaatccaggcgttcacggccagcaagtgagccgctccatcaggggcccgaaactctcaagcccctttctggagagatgcctggctggaccgtaggagcgctgtgctctgagcttagaaagggaggtggcggatggagtgggaagtgagagacactgatttttaaatatcaaaatttcccttctgaagtcgttcagatgtgttccttaaaaagaagatggaattctctgtagagcgtctcaatccacttttaaccatggatgagagcagactccatttaccctgaaatagcagcttctcttgagaggagagtgacatggaagcaactccgtctgctgcagctgaccccctcacactgagttcacagtgcgccctccctccctcccatctgggggtagtgccttatgctgggtgttggagcagagtgagggagaggaaaataaagacctgcacatctgaccccaaggtgtcaggccggtttactggtaaccacctgagaagtagtttcagccacagaagaaacgaacacgtctgggggctgtgagttgccgggacgtggtggggactttcccctagagtggtctggcccccatctgagtcttaggctctgctgtaaaaaagaaacccaggttagcagtgccggtctgtgccagggctgtgggcagaggggatgatttctgagtggcaggggtgcaagggactttgtcctttctgtcaccacagagctgctcatacaacagtgggacatgacaacggtttggcttctcagctcagacacaccatgttataggggatcacaaacaagatggtgagtgcaccaagggctttgcagggactgtggcctggcggggtcagggctgggtgcctggtttctgttcacatttactcttggctgggccatccctgtcctcttcctcaggcagcgccccccctgtgagtttactcatacctcaggctggagacacaggtctttgtacacagtctccacgctgtggcagacttgtttgagctctgtctccaaatggctgatctttgccattttctgggtgaactcttggagcttttcctggatgatcttgttgtggtcattataaatctgatagatcctctcctctaatttctctgtcagatccgaaacctgttaaacaataagatgtgttctcggaaaatcaaacaagaggtatcacaagacatctgtgttaagtgggtttcttagatttctgcaatttatcttatgaaaatgacaaaataggctgggcacggtggctcatgcctgtaaccccagcactttggtaggccaaggtgggtggattacttgaggccaggagttcaagaccaacctggccaacatggtgaaaacccatctctattaaaaatataaaagctaggacgggtgtggtggctcacgcctgtaatcctaacactttgggaggccgaggcgggcggatcacgaggtcaggagatcgagaccactgtgaaaccccgtctctactaaaaatacaaaaaaatttagccgggcgaggtggcgggcgcctgtagtcccagctacttgggaggctgaggcaggagaatggcgtgaacccgggcggcggagcttgcagtgagctgagatcgcgccactgcactccagcctgggctacagagcaagactccatctcaaaataaataaataaataaataaataaataaataaataaatacacaaatacataaaaactaactgggcatggtggtgtgcacctgtaatcccagctactcgggaggctgagacaggagaattgcttgaacctgggaggtggaggttgcagtgaaccaagatgatgccattgcactctaacctgggcaacaagagcaaaactccgtctcaaaaaaaaaaaaattagcaaggcataggtgacgcgcacttgcagtcccagctactcggaaggctgaggcaggaggatcacttgagcccaggagttggaggctacagtgagtcatgatcacactactgcactccagcctgagagaccctacctcaaaagaagaaaagaaaaacaccaaaaactaaaacccagtgcagtgactgggggtcagattgcctatattttaaatttttttgctttttttgttttgttttcttgcggcggagtttcgctctcattgcccaagctggagttcaatggcatgatcttggctcactgcaacctccgcctcctgggttcaagcgattctcctgcctcagcctcccgagtagctgggattacaggcgagcgccaccacacccagctaactttttgtatttttagtagaaacggggtttcaccatgttagccaggctggtctccaactcctgacctcaggagatccccaccttcagcctcccaaagtgctgggattacaggcatgagccactgcacctggcctgttaaatttttttaagaggcaaaagtatatacagtcgtgtgctgcataatgacattttggtcaatgtcagactgtatatacaatgatggcccataagagtataatgccatatttttactgtaccttttctatgtttatatatatttagatacacaaatacttaccatcatgttataagtgcctacagtattcagtatggtaacatgctgtgtgcaggtttgtagcttaggagcaataggctcttccacgtagcctaggtgtgtagtagactataccatctaggtttgtgtaaattcaatctatgatgttcagatgatgacagtgtcacctagggatgcatgtcacaaaactgtacagtacaagctcagccaggttaggaagaaagtacacagaatagaagaggcatccaacaaagtggcctctgggtgctgtatcaaaataaataaataaataaataaatgtttttgtatcttttctactagaggccaaggcagcagggtgaggagttcaagaccagcctgggtaacatagcaagatcccatctctacaaaaaaaatgtttaaagaaaattagctgggcatggtggtgcacacctgtagtctcagctacttaagaggcagaggtgggaggatcatttgagcccaggagtttgaggctccagtgagctgtgatcgtgccactgctctgtaagcctgggcaacagagtgagacgccacctctaaaaatataaataaataaataaaacaagtgagccgggcatgatgttgcatgcctatagtctcaagctactcgagaggctgaggtgagaagattgcttgagcccaggagttcaagattgcagtgacctatgattccaccactgcactgcagtctgggcaacagcaaggcttgtctcaaaaaaaaagaaaaaggaaaataaagtcaatctgtcatcaagacacctagaaccagcaagctgtcccactcatgtgacccattatgtattttgtttgtttgtttgtttgctggaattataggcacgtgctaccatgcctggctaatttttttttttttttcgagacagccaagatcgtgccactctactccagcctgggctgggcaacagagcgagactctgtctcaaaaaaaaaaaaaaaagaaaaagaaaaaaccagaaagaggcagtcttctttttcttctttttttttttttttgagatgaagtcttgctctgtcacccaggctggaatgcagtggcgggatctctgctcactgcaagctccgcctcccgggttcaggccattctcctgcctcagcctcctgagtagctgggactacaggcgcccgccaccacgcccagctaattttttgtatttttagtagagacagggtttcatcatgttaaccaggatggtcttgatctcctgacctcgtgatctgcccgcctcggcctcccaaagtgctgggattacaggcctgagccaccacgcccggccctcttctttttttttttttgagacggagtctcacctgtcaccaggctggagtgcagtggtgcaatctcggctcactgcaacctccgcctcccaggttcaagcaattctgtctcatcctcccgagtagctgggactacaggcgcgcaccaccatgcccagctaatttttgtatttttcatagagacggggtttcaccatgttggccaggatggtctccatctcctgaccttgtgatccccctgcctcagcctcccaaagtgctgggattataggcgtgagccaccacacctggcccctatttatttatttttgagacgaaatcttgctctctagcccaggctgcagtgccgtgcagagccactgcactgagccaatttttttatttttagtagagacgtggtttcaccatgttggccaggctggtctcgaactcctggcctcaagtgatccacctgcctcggccttccaaagtgctgggattacaggcgtgagccactgtgcctggtccccccattatatattctgaagaggcatcaggtgcaaccattcatgtaggacctgaacatcacaccagcttttgcaagatgtaagccctgggcatgtggaagaagctccactcccccgtcacagaccattcgatggcttctgcaggacatatgggtgtgacaatgcaagttgtgcctcaaccccctactcccgtggctgctcgaccttgcgtgaagtaagagggctgcgtgttggaggcaggagggcatccaacgccccgctccctcagcctggctctctcgtcaggcaaatcattcatttccaagccttatctatatcatgggtccaatctcttctctgtaggactattctaagggtaaattgagatacagatggtcccaacttactacagttcaacttactacatttttgacttacagcattttcaactcacaatgggtttattgggacgtagccccatcataagtggaggagctcctgtgctgtgtgtgaatggcctagcaccgtgcctggtgtacaacagacaccatcagtggttcattccctccccttttgcataaggaatcccccctctcgctgggtggagtctgtcaccttggtcttcaggctgttcctgaagttggtcatgagtgcatggtccttttgccggctcttgttgatgttttcgatcagctcctgggctctcttctgcaggatgtcaatgcttgagtccagagaggagaagtagagtcccgacttcccttccaggaccgtcagctggcaactggcactggaggtggcgacacaagggcaagaaacctgacttctcagagtacaggaagcggccaggtgtagtcgctcatgcctgtaatctcagcactttgtaggccgaggtgggcggatcacaaggtcaggagttcgagaccagcctggcaacatggtgaaacctcgtctctagtaaaaacaaaaaaacaaaaaattagccaggcacggtggcacgtgcctgtagtcccagctacttgggaggctgaggcaggagaattgcttgaacccaggggatgaagttgcagtgagccgagatcacgccactgtactccagcctgggtgacagagcgagactccgtctaaaaaaaaaaaaaggacaggatgctgagatcagcaccagactcttccaagagcggctgatctgagagagatcaggtgggaggggacccgcgttgttgccttccatgggtgacacgaggcatgcttcctaggttattccattcacacacacgccctgaatgatgagaatggcacccccattttatagctgagaaaacagaccaagaggcacgactaaatatgcccaaggttccagaccaaggaggtctgtctgtccccaaagcccactgttattttatgacaccaacttgcttctttggaattttggaataccaataatagtgtcaatgctttctttcttttttttttgagacggagtctcactctgtcgcccaggctggagtgcagtggcgcgatctcggctcactgcaagctccacctcccgggttcatgccattctcctggctcagcctcctgagtagctgggactacaggcgcccgccaccacgtccagctaattttttgtatttttagtagagacggggtttcaccgtgttagccaggatggtctccatctcctgacctcgtgatccgcccgcctcagcctcccaaactgctgggattacaggcgtgagccaccgcgcccagcccaatgctttctttcttattttctttttttttatagagacaggtctttctctgttgcccaggctggagtgcagtggcacaatcatagctcactgcagtgtcagcttcaagtgatcctcccacctcagcctcctgaataggtgggactacaagcatgtgctaccatgcacagctaatttttaaaatttttaaatagagactgggcttcactatgttattcaggctgctctcaaacttctggcctcccaaaatgttgggattacaggcatgagccactgcgcctgactgatgcaatcagcaatctcctgcaacctctgtctcctaggttcaagccattcttctgcctcagcctcccgagtagctggaattacaggtgcacaccactacacccaggtaatttttgtgtttttagtagagacagggtttcaccatattggccaggctggtctcgaactcctgacaagtgatcctcctgcctcggcctccaaaagtgctgggattacaggcgtgagccactgcgcccagcctgatgctttcttaagtgaccttcctgtcattaacctgctgcatccctttcccaacctactgggtgatgttgaccgcctggggctacagtgtacctgcacctccttgctcccaccaggtgaggtgaatacctgttgaattatatttaaagagcatttaaagaaatgcgcacacacaaaaagttgttggtcccatgttgtacatgtaactgtaattatgtaattcaaatattgtgttaacaagtgaaatagtggcagaagagtgacagctatctaaaaagctaaacagaatgaaaaattttgagtaatatgtaatgttccgtaacttcataatattcaatgtaataaaatggaacttcagttgggtatgggagagagaactaaaattgaagcaaagatcataaaaatctagaaaaattctgcatatagattgctctgccaaggccttgttctctgctttaaaaacagaactggggccgggcgcggtggctcaagcctgtaatcccagtactttgggaggccgaggtgggtggatcacaagggcaggagttcgagaccagcctggccaacatggtgaaaccccatctctactaaaaacacaaaaaattagccaggcgcagtggcaggcgcctgtaatcccagctactcaggaggctgaggtacaagaatcgcttgaactcgggagccgagatcacaccactgcactctagcccgggcaacagagtaagacttcgtctcaaaaataaataaattaattaaattaaattaaaataaattaaaacaactgaaaattgtgggtaatgcattgtgaatgaagtttatggaaaaaatgtgatctgataaggcaacccattggtattttaaattaagatatattttttcttcttctgatgctctggtttatttgaccggtttgacgtctgatcagttagcggttctggccaggtagagctgcccctgtgagtcacagctaacttttcctcagccatgttcccggcactgagctaagtcacatgccttgtcttggtgcatcctcacgaccacactcgggtcatctgctgttctctttacgacatgggcttagagtggttacaccaccttctcaaggtggaggacagtctgtggcagagctgggctttgtacccagaaggcctgacttcccagctggtatcctgcttcctactaaggcactcaggcgccactcccctcctggatcttacatttcctcgtcgccctctgaggtcctccagctctgaaaggccaagccttgtaggtgtggacagagcagttcctgaatgcagcaggtcacacttgtgtccacaagcaggttactgattacttacaaaaataaatcttggccaggcacagtggctcacgcctgtaatcccagcattttgggaggccgaggcgggtagatcaccagagatcaggagttcgagatcagcctggccaacatggtgaaaccccgtctctactaaaaatacaaaaattacccaggcatggtggcatgtgtctgtaatcccagctactaggcggactgaggcaggaggatcgcttgaacctgggaggcagaggttgcagtgagctgagatcgtgccactgcactccagcctgggcaacagagcgagactccatctcaaaaatataaaataaaataaaaataaatctcagctatctcaaccaggcacagtgggctcacgcctgtaataccagcacttcggggggctaaggcaggtgaatcgtgagctcagggttttgagaccagcctgggcaacatggcaaaaccccatctctacaaaaaacacaaaaattagccgagtgtggtggtgtgtacttgtagtcccagctacttaggaggctgaggtgagaggatcacttgagcccgggaggtcaaggctgcagtaagcttgatcatgccactgcactggagcctagatgatatcacgccactgtactccagcctgggcgacagagtgagaccctgtttcaaacaaacaaacaaaacaaccacaacacacatatacacccctcccctctccacccggtctcccccagccggccacctccctctttcctccccatcaaggccaaggttctagaaggagctgcttaaattttctgggctttttttttttttttttttttaagagagagagagagtctcaccctgggcttcttttcttttcttttgagacagagtctcgctctgtcaccgaggctggagtgcactggcatgatctcagctcactgcaagctctgcctcccgggttcacgccattctctttcctcagcctcccgagtagctgggactacaggcgcccgccaccacgcccggctaattttttgtatttttagtagagacagggtttcaccgtgttagccaggatggtttccatctcgtgacctcatgatctgcccacctcagcctctcaaagtgctgggattacaggcgtgagccaccgcgcccggccatcctgggcttattttcttacccccattcacttttcagtccattgtaatcaggttcctcccccggttctcaaatgaaacagctcctaccacagtcaccatgaccttgtggttagaccgatagacatctcagagtgacatgctgacctcttggcagcagccagcactgctgaccacccttccctgctactcccgacatgtggtatcccagaggtctgtgcttgggcctctgctgtcttcttgccagacaccgtcaatcacacacttgttctgcagtgaggcctccatgcctcctccctgctggcccctgcagctaatatcccagccaccattccacaatgcacaggctattattctccaaaggcattcattcccgtagcatgggatccctgaacagtcccctttcccacctacgtcctgtctcctccagaaagtgttccttggctggattaggtgcacacagcacctacggtttcactgtttacaccttggcctcccactgtagtctgctgaagggccagggccatccttcatctttgtatcttcagtacttacccctcatgagagaagcaataaatgtgctgctaataagtaaatgacttgcgagtactatccattaccatccacactttggattctatcatctaaattctatcatcccagcccatgcctctctcctgaggacccaagaatatatgaaacctcccagcctccccacatggctgtctcaaaggcatctgaaactccacatttgcacaaccaaaagcgtcatctcccaggcaacccgatttcatcttccattcccttagttaatgacataaaaagccacctggttcccaagctcaaaacttagcagcaagcctagagtccagcttctctctgtccctctgcatcctgtctcaaaatcccctcatttctaccttctttgtttttttatttttatttttaattaatttttttttcagatggagtttcactcttattgcccaggctggagtgcaatggcgcgatctcggctcactgcaacctccgcctcccgggttcaagcgattctcttgcctcagcctcccgaatagctgggattacaggcatgtaccaccacacttggcgaattttgtatttttagtagagacggagtttctccatgttggtcaggctggtctcaaactcccgacctcaggtgatccgccctcctcggcctctcaaagtgctgggattacaggcatgaaccactgtgcccagcctttttatttatttgtttttgagacagagtcttgctttgttgcccaagctagagtgcagtggagcgatctcaggtcactgcaacctccaactcccggtttcaagcgattctcttgcctcggcctcccaagtagctgggattacaggcacctgccaccacacccagctaatttttgtatttttagtagagacggggtttcaacatcttggccaggctggtctccaactcctgacctcgtgatctacctgcctcagcctcccaaagtgctgggattacaggcgtgagccaccatgcccggccctaccttcttaatgtctctaaatctaccatcattagcagctctataactttcacttctcaactaggccatagggacctttattttatttacttatttatttttgtaaaaaattttgtaataaattttatgttaaaaaatttttttttcttttgtaagaaattttcttttgtaaaaaattttgttattattattttgtttttgagacagactctcactcggtcgctcaggctggagtgacaggctggagtgtcgctcaggctggagtggtgcaatctcagctcactgccacctccacctcctgggctcgagtcattctcgtgccccagcctcctgagtagctgggactacaggcacacaccaccacgcccggctaatttttgtatttttagtagagacagggtctcaccatgttggccaggctggtctcaaactcctgacctcaagtgatccgcctgcttcggcctcccaaagtgctgggattataggcatgagccaccacgcctgaccttttatatatatatattttttttgagatggagtctcgctctgtcccccaggctggagtgcagtggcacaatctcggctcactgcaagctctgcctcccgggttcatgccattctcctgcctcagcctcccgagtagctgggactacaggcgcccgccaccacacctggctaattttttgtatttttagtagaggcggggtttcaccatgttagccaggatggtctcaatctgctgacctcatgatccgcccgtctcggcctcccaaagtgctgggattacaggcgtgagccaccgcacccggcctgacctttttttttcttttgaaggcagggtttgctacattgccaagctggagtacatcagtacaattactgcaactttgaactcccccaggctcaagtgatcctctcgtctctgcctcctgaatatctaggactacaggcgggtaccactactcctggctaaattttgtttaatttttctgtatagatggaggtcttgctatgttacccaagctggtctcaaactcctggcctcaaaaaatcctgcctcggcccccaaagtgctgagattacaaacgtgagccacagtgtcagcccctagtgacattctacactgtaatctgatttcctactcctgtttgttagcctaaaaccatccccaccagccacaagatcaagtctaaattccttcacacagcatacaaggccttccagggccctggcctccaccctctcttccagccttaatgggtttttttctttttctttcttttttcttttttgagaaggggtctcactctgtcgcccaggctggagtgcagtggcatgatcttggctcactgcagcctccacctcctgggttcaagcaattctcccacctcagcctcccctgtagctgggattacaggtgcctaccaaccatgcctggataatttttgcctttttttttttttttttttttagacgaggtctcgctcagctgcccaggatggagtgcagtgccacgatctcggctcactgcaaccactatctcccaggttcaagtgattttcccatctcagcctcctgagtagctgggattacaggcacctgccatcatgcccagctaatttttgtatttttagtagagatagggtttcaccatgttggccaggctggtcttgaactcctgaccttaggtgatccacctgccttggcctcccaaattgctgggattacaggcgtgagccaccgtgcccagtgcagccttactgttttctttttgtttgtttgtttttttcaagacagagtcttgctctgtcacctaggctggagtgcagtggcacgatctcggctcactgcaacctctgcctcccgggttcaagcaattctcctgcctcagcttcccaagtagctaggattacaggtgcccaccactgcacccagctaacttttgtatttttagtagagacagggtttcaccatgttagccaggctggtctcgaactcctgacctcgtgatctgcccgccttggcctcccaaagtgctgggattacaggcgtgagccaccaagcccgatctagccttactgttttctacagcccctccatctgcagcaattggggacctaccacaatttccccaaacatgtcagcctttgcctggaatgactttcccttcctgcctccttcataatggaacatttggaacttttgcttctctaccccccgctatacctaggccttgctggtcacaaagctgccaaagtttatgaacatcagtcccctccagcgcacgacaccttgagggtgcagactacaccctactcatttgttttgcagcaccccaaaggtttcatcagtttgctgaatatctaaatgaatgcagcactgacattggggctcccacacctcctcgtacccagttcaccttgttgtctcagcctctcctggatgctctcaacagtttcagaccctaaaattaaaatcgatgagagcaccaggtgtttctttttgtgtgattgttcacaacctgcttgagctgctaatggttcagagctgctcctttttaaggctcaagggatgaggctggaaccggttttcatggcagctaagcaaacagtaaaaaaaaaaaaaaatcacttgaattcagctaattcgagtttcatggtaggacaaaggcctgcatcagatgtctgctgagagcttctttatttttccaacctctcctttggggatttatcccttttgatttcatttttcttaatacacagcagctgcatattaatcaggatgctaatgaatcataggcttccctgggcctgcattcaccaattaactttaacaaacaaaatgcgtggtgtcctctctgctggctttcccggttcctaggctggcttctgttgccgaaccctggaccgaggccagagaatgcaagtcagcccaacacagcacgtcgggtgtgcatggcctgcgcccggattgggcagcgggctgggggctgtgaacacagcgctgcgttcatctattatggtctgtccttctaagaagtccctaatttggctgcgaggattaggacatagttcccaagcagggcccacgctggcagggggcccaggagctgcggaggaaatgggtctaagcgaagagaccatctgttcgctccaggtaaagctgtgattggcaggcgactgagccagaactgcccgctggtggggccctccctccgtggcctctaacagatatacaagtaaacaatccgccagccacttatgaccaccgagggtggcagtcccgggagaggaggcaagctaatcaaacattcaaggggggaacacaacagaatctctggcgcttgggcaaaacaatgttttgctgaagtacagccaggaagggggaaggtttgaatggaagctgatgagccagttcctcaacctctccttttctctctggaaacgtgttaacattttaatcatgttgctgagtatctgctgctggatctattaactggcccctgcactggttttaatctatctgttttttggcccagggttcctgtggagctccttgaagtctctaaatgatttgcagcggtctgtgtctcttcactacacagatcctggtctaaacatgctattccgcagtaaggtattagcaaacaaacgacttcaaccattgcttccctttttttttggtctccaattgacagcacacacctataaaccatttcacgcgtggcctgctttccagcagaggaatgtgcgaggagagggaagctggcttgctttctgcctagagtcctcagggccctgtcctgaccctcctctcactccttctccaggtgagctcattcattccacagctgctgctgaaacaatgactcccacagaaccatctccagaccctcaccccaccccgagttccgggtcagaaagttgaactgtatcctggacatgtggatgtccctggccaccgaaagtggctcagataaacaaggacaacacagaactcatgttcttgtctctgccagagaagccaccacctaccggaaaccaccacaagctggaaagcagacagcagtgatgtgcttgtaagcatttagcaactggctgtgtgatgggggggaagccctgattcgtagtgtttgccaatttccgtggtgcagagcctcccaccattagccaatttcaggctaccaacatgaagacgctaaatgccaagttgggaagagatgtgtagaattggctctttcaagccggtaggagctggccccagtacatcatggccgggaaacatcctccctcatccccttcctgtgtcttatggcacaaggcacttcctccatctgccctgctaaaggccaccccccccacaccccccataaaagcctcccactagacctccctacacccacacattctccctcccaaccattctctacaaagcagccatatttttttattaatattttttgagacagggttttgttcttgttgcctaggctggagtgcaatggtgcaatcttggctcagtgcaacctctgcctcccaggttcaagcgattctcctgcctaaccctcccaagtagctgggattacaggcatgcaccaccacccctggctaattttgtatttttagtagagacggggttttgccatgttggccaggctggtcttgaactcctgacctcaggtgatccatctacctcgaactcccaaagtgctgggattacaggcatgagccatcgtgcccggcctgcagccgtatctttttataacgggaacctgagcatgtcacttctgtgacccagcagttcccctcctaggtatgagtatgcccagaagaaatgaaatcatctgtccacacacaaacttttctaaatggatttcatagcagtgctgctcataatagccaaaaagtgaaaaccacccgaatgactatcaacagatgagtggataaacaaaatgtggtagactcatgtggaatattattcagccattgaaaagatgaagtccagatgcagtggctcacgcctgtaatcccagcattttgggaggccactgtatctggcctggagtgatgaagctgttttaaagttgactatgagaatggttgtccagctctgaatataccaaaagcaatcaaatcatacccttcaaggaggtgagccgggcgcggtggctcacgcctataatctcagcactttgggaggccgaggcgggcggatcatgaggtcaggagattgagaccatcctggctaacacggtgaaaccccgtctctaccaaaaatatataaaaaaaaagccaggcctggtggcacatgcttgtagtcccagctactcgggaggctaaggcaggagaattgcttgaatctgggagggggaggttgcagtgagccaagatcatgccccctcactccagcctgggcaacagagcgagactccatctcaaaaaaaaaaaaaaaaaaggtgaaccgtatgctatgggaattatatctcaaagctgttactgaaaaaacctctaggataaagtctgtagcccacaaaatgcctcataacctggccccttctgcagccctccccttgcactcacccctgtaccccactcgctcgcctagccacactggccttcctttagctcccccgaatgccacgagcagggacttcgcacgagctcttctctcaacccctccttccccaccctgcccacactttctgcttcaacatctcttctacaaggacaccttccctggctccccattccaggctggctgcccacaggggaaaggtctcccagcaccatgatctcttccctgttggtgtttggtcagatgcaaacagcaggagggtatgagcatgtctgtctggaggacaggagtgtccctgctgccaatcacaatactgccatatcagcctttttttttttttttttcctcgagacagggtctcactctgtcacccaggatggagtgcaatggtgctatcttggctcactgcaacctctgcctcccaggttcaagcaattctcctgcctcaggctccggagtagctgggattaaaggcatgcgccaccacgcctggctaattttttgtatttttagtagaaacagggtttcactatgttggccaggctggtctcgaactcctgacctcgtgatccgcctgcctcggcctcccaaagtcctaggattacaggttgagccactgcgcccggccaacatgagcctccttcttgctcttttgagaacacatcaagcttattcctacctgagggacttcatacttgcggccccctctgcgtggaaggtttgggcccagaatgcctcctggctggcctcttctcatgtgacctcttcagagttctccaactgctctaaggtccctgtcactctacttgctccttactatattttgtttcttcattccacttacttgccaccagttgaaatcacattattcacttatttatttttgagacagggtcttgctcttccagtgcagtgaagcaatcacgtctcactgcagcctcgacctcccaggctcaagtggtcctcccacctcagccttccaagtagctagggccacaggtgtgtgcaaccgcaccacaccacgctcatttctttctttctttctttcttttttttcagagagatatgtctccctctgttgcccaggctggtctcaaactcctgggctcaagggatcctcctgccttggcctcctgaatagccaggactacatgcatgcaccaccacgcctggctgatttttgtgtttttagtagagacggagtttcaccatgtgggccaggctggtctcgaaatcctgacctcaagttatctgccagcgccagcctcccaaagtgctgggattacaggcgtgagccactgcgcccagcctctactatatatatactttttttttttttttttgagacagagtcttgctctgtcaccaaggctggaatgcaatggcacaatcttggcttactgcaatctctgcctcccaggttaaagcaattctcctgcctcagccttctgagtagctgggattacaagtgtctgtcaccatgcctggctaatttttgtagacacagggtttcaccatattggccaggctagtctcaaactcctgacctcatgatctgcctgccttggcctcccaaagtgctgggattacaggcgtaagccaccgtgcccggcctactaaatttttcttttttcttttttttgagacggagtctcactctgtcaccaggctggcatgcagtggcatgatctcggctcactacaacctctgcctctggggttcaagcgattctcctgccttagcctcccgagtagctgggactacaggcgtgcaccacaacacccagctaacttctgtatttttagtagagacggggtttcatcatgttagccaggatggtctccatctcttgaccttttgatccacccccctcggcctcccaaagtgctaggattacaggcataagccaccattcctggctttttttttttttttttgagacagcgtttcggtctttttgcccaggctggagtgcaatggcgccatctcagctcactgcaacctccacctcctgggttcaagcgattctcctgcctcagcctcctgagtagctgggattacaggcatgtgccactatgcccagctaattttgtatttttagtagagacggggtttctccatgtttgtcaggctggtctcaaactcccgaccttaggtgatccacccgccttggcctcccaaagtgttgggattacaggtgtgaaccactgcacctggccaatattttttaataaattggcccgacattctggcccgcctctagtcccagccatttcggaggctgaggtgggaggatcacttgagtctgggaggtggaggttgcagtgagccgtgatcatgccactgcgtggtgacaaagcaagacgctgtgttaggagggaaaaaaaaagcagcagacactggcatagccttgtggaagaaaagggtgaatgagagggacccaggggcctgtgtagacccatagggctgggatcttcctcacctagctggccctccaccagcttcctcctcgcagttctcttcccaccgcggatgctccttgctctcccccaagggctgcggttcctggtctttgcatttcacatggggcacgtccacctgcaagcacagtcaggacggaggccaaggagggaggatgaggagtgaacagatcgccctcctgccgacccttcaaccctggtcacctcgatgtgctgctgcgggacggtggggacccgcaggaaagacgggcagggctggggcaggtgccatgagggcaggggcatggggtgaaaggacactctgtccctaggggacaccaggacaccagacctagaggggccgggtgagggcagggctgtgggaatgtaactggaggacctgggctcctaactggtatgtgtgttggctggagtccttcgagaaaggagaagaggtaggagaaaagagatgaggccgggcgcggtggctcacgcctgtaatcccagcactttgggaggcggaggcgggcggatcacgaggtcaggagtgcgagaacagcctgagcaatatggtgaaaccccgtctctactaaaaatacaaaaattagctgacgtggtggtgcgtgcctgtaatcccagctactcgggaggctgaggaaggagaatcacttgaacccgggaggcagaggttgcagtgagccgagatcacgccactgcactccagactgggcgacagagtgatacttcgtctcaaaaaaaaaaaaaaaaagaaatgaaagaaacgggtgcggtgcgtgggtgtttgtgcctttctctactccgttccggccacgcgccatgtgtggaaatcagacccgtcagtgcgtcagtcagggccgggttcagtcagtcaggaaatttgaggccaggcctgatgagagggagccccaatggcaaaggacaagcggccgggctcgggtccgctggagatggctgggatcgcagccgttccctgcctatctgtccgcccgccccacgcgcgagaaggaaacaagcgccgcgtactccctgtcgctccattccgtattttcccgccttcaagctcgcaccctctgcgcatgcgccgaccccgcccctggccagctgcgctcccgcggacgagtgtgttgtgacgcgtgctcccggccccgccctctttgagaacttgcgcggccaactgggcggggccgaccgttaagcagcagtttcgcggtccgcgggctgcgcgcgcagtcggcgccccttgggagcaggacggcgcgctctgggtgcgcttgtgtgcccctgtgaggctcctgggttccacggggcgcccaggttatacggatctcagagtcctgtatttattcggtgcttctaacttcatccactctgccttggaaaatatactccataacaatttttttttttttttgagacaagatcttggtctgtcgcccaggctggagtgcagtggtgcgatcacagctcactgtagcctcgacctcccaggttcaagcgatcctcctgcctcggcctcctgagtagcagtgtcattcaccaggcccttctaatttaaaaatatttttctggccgggcgcggtggctcacgcctgtaatcccagcactttgggaggccgaggcgggtggatcacctgaggtcatgagttcgagaccagcctagccaacatggtgaaactgtctctactaaaaatacaaaaaatagccgggcgtggtggcgggcgcctatagtcccagctactcgggaggctggggcaggagaattgcttaaacccaggacgcagaggttgcagtgagctgagatcatgccactgcactccagccggggtgacagagtaaagctccgtctcaaaaaaaaaaaaaagattgtatgtatatatacacacacacacacacacacacacacacataattatatttttttttcctgtagaaatgagatctcactgtgctgagcccaggctgatccccaactcctgggctcaagccgtcctcccgtcttggtctcccaaagtgctgtctcaaaaaaagaagaaattatctgatctaccctattgactgtaggtcataagacccccgtttcaaagaagtttctgccccacacaaggcctatctatctagattcttcttggcctctctgagcatgcattcctgagactccaagaagaatctagacagataggccttgctgggtttccccactcagcctattagtattagacgacccccccggctttttttttttttttttttttttgtcttgctctgttgtccaggcaacactggagtgcagtggcaagatctcaactcgctgcaaccttggcctcccaggttcaagcgattctcagccaaccaagtagctgggattacagatgcaccatgcccagctaatttttgtatttttagtagagatggggtttttccatgttgctcaggctggtctcaaactcctggcctcaagtgatccacccgcctcagcctcccaaagtgtcaggattacaagtatgaaccacgacaaaccctttttgtccaatcaaatttctacctgggtgttcaaactttgctgaacctaagcataagacacttttcattaatcaggcatggtggcgggcacctgtaatcccagctgcttgggaagctgaggctgctgtgagccaagatcgcccctacactccagcccagggaacagagccagactccgtctcaaaacaaaacaaaacaaaaacacagtttcccctgtatctctggatcttcattctgaaggcttgtcaggtaacactatgatcaaatacattcgtattccttttctcttattaatctgccttttctcagtaatttttagtgaaacttcagagggcaataaggaagctttctcttcacccctacacagccaaagttcagatttgatggaaatggcaagattccagggtacttgtgtttatttagacacataaatatgtatttaacgacagggtctcactctgttgcccaggctggagtgcagtggtgtaatcacggctcattgcagcctcgacctcccaggctcaagtgatcaacctcagtctctggagtacctgggattacaggcatgagccactatgctgagctaatttttgttttctgtttttgggggacaggtctcactctgtggcccagactggagtgcagtggtgtgatctcagctccctacaacctccacctcctgggttcaagtgattctcccacctcagcctcccagatagctgggactacaggtgcctgccatcatgcctgctaatttttgttttttgtttttttttttggaacagagtcttcttctgtcacccaggctgtagtgcagtggcacaatcttggctcactgcaacctccacctcctggttcaaacgattctcgtgcctcagcctcccgggtagctgggactacaggtgctcaccaccacgcccagctttttttttgtatttttagtagagacgggttttcaccacgttggccaggctgctctcgaactcctgacctcaagtgatctgcctgcctcagcttcccaaagtgttggaattacaggcgtgagccaccacgcccagcctaatttttttttttttttttttgagacggagtcttgctctattgcccaggctggagtgcagtggtgcgatctccgctcactgcaagctccgcctcccaggttcacaccattctcctgcctcagcctcctgagtagctgggactacaggcacccgccaccacgcccggctaattttttgtatttttagtagacagggtttcaccatgttggccaggatggtctcaatctcttgacctcatgatccacacgcctcagcctcccaaagtgctgggattacaggcatgagccaccgcacccagccctaatttttttatttttagtagagatggggtttcaccacgttggccaggctgctcctgaattcctgacctcaagtgacccacccaccttggcctcccaaaagttctgggattacagaagtgagccactgtgcctggctcagtacccatactttttttttttttttttgtatttttagtagagacggggtttcaccctgttagccaggatggtctcgatcgcctggcctcgtgacccgcccgcctcagcctcccaaagtgctgcgattacagacgcgggccacctcgcccagcccagtacccagaattttgaccatcaagtggcacactgagctagggggacccaacaagacccctcacccctaaggaaagccaccagatgggggcaactgcccactttattagacaataggtggcccacaggtctcctcagggcccaccctcacagtagacacaccacacaggacaacagaaggaacctgctacccagtcctctgtccctgggattctggtcctgggacaggtgggaaagaggaaggtgggggctggcctcacagaggcctcataaatacaaggtcactggccagggatgcaaaggagcgcagcagcagggactcggggaggatgacctgtcctagagtggcccatgtcacgcagcctcctgtgtgggagggggcctcggctcggcatccaggcggcacaggggactgtcatacaccatctgcaggttcaccttgtggcccaccagctcccggatattgttgatgccatatttgatcatcgttgggcttgtgggggagggaacagagtttatcatgaggtcagcacgtgcacccttctgctcagatttccatggctcccatcttcttcagaggaaaagttcaagttctccccatgacccacagggccctgcgccaactgctctatcacctctcaccctccgccttcagccacaccagcctcctcactcttctcctaatacaaaaagcacattcccacctctgggcctttgaactgactgtgaccactacctgggacacccttccccagatactctcatggtttacctctttatctacctctagattttgcttaggtggcacttcttcctccatgatgccttcactgaccacgtagttgccttagccctccctataccacttactgccctggtacacacttctgtcttcttttgctgagtgcatttgtttttttgaaacagagtctcactctgtaacctagggtggagtgcagtggcgtaatctcagctcactgcaacctccgcctcccaggttcaagtgattctcatacctcagcctcctgagtacctaggactaggactacagacgcacgcaacagtgcctggctaatttttgtagttttagtagagacgggagacagagtcacactctgttgtctagactagaatagagtgcagtggcatgatcttggctcactgcaacctctgcctcctgggttcaaacgattctcctgcctcagcctcctaagtagctgggattacaggcacctgctaccacgccaggctaatttttatatttttagtagagatgaggtttcgccatgttggccaggctggcctcgaactcctgtcctcaggtgatgcacctgcttcagccacccacagtgcttggattacaggcatgtgccaccacgcctggcctgtttttattctttgtagaggcggagacttgctctattgcccaggctgatctcaaactcctggctcaggcgatcctcctgccttggcctcccacagcactgggatgacaggcatgagctaccacgcctggcctgatgtacttgttggtcttgctagttatcatccttctcgctccactgggaccccagattcagagggagggacataagctgtcatgttcacagcacggggctgagcattcagtttgtactcacgatgaaagttttgtccattggatgaatgaatgggtggtgctgaaaccacgcaggcccctatacctggagagttatttgaggcagctggacaccccgagtttccacttgggcacttaccgctccagggagaggccccaggcaatgaccgacacgttctcgggaagccccatgggcagcagcatctctggacggaagacccccgagtttccgacctccacccacttcttcaggcctgcagaggcaggacagaaaagacgggcagtgcgtgttgagtttctgggcactgctggtacaggttctgggtctaggtggtgagcttgggaggtggggtacaggcatggcaatggggggacccaggccaaaccatagtagcctgagacctccctcccaccccagtaccagggcctaccctgaccttggtggtagctgaacacctccatgctgggctctgtgtatgggttgtaggctggcttgaagcggagttgcgtgatacctgcaggaagtggggggcgggcaggagagcaggggtttggaggataatgctggtgatcaacacacctgcccgctgcctcaccaccatggcccacccctgcccccctgctcacccagcttggtgaagaactcccgcagaacgcccatgaggtggcccaaggtgagaccatgatccgccaccacgccctcgatctggtggaactcagccaggtgcgtggcgtccagggtctcattccggaatacgcggtcgatggagaagtacttgaccggagtgaagggcttctaggggtgacaaccgagccaggcccaggtatgggtcagaaggtccctttgacagcaccctctccccactggggcccccgcctgggccaaccgcaccttctgggcaaggcggtagagcgcacgggcgctggctgatgtggtgtgggttcgcagtaggtttttccgggcctcgtccagcttccagttatacttgtaccttcaggagggaaggtgggaagtccatgcaatggcccaggggtccccagcctccttcccttccataccaggtaagtcctgcctcacccctgtgagccgtagccgccctgagagtgggtccgcttgacccgctggacatagtccattgggagctgcagggcctccgctggatctgggcaggacagagcaacatcaggtcagtcaacgagcatttcccacccctttttttttttcagacagggtctcactgttgtccaggctggagtgcggtggtgcaatctgggcttactgcaacctctgcctcccaggttcaagtgattctcgtgcctcagttttctcatttgtgtgtggcttttttgggttctttttttttgagacagagtcttgttcagttggcccagctgaagtacaatggctcaatcttggctcactgcaacctccacctcccaagttcaagcaattctcctgattcagcctcccaagtagctgggattacaggtgcctgccaccacacccgggaaatttttgtatttttagtagagatggggtttcgccatgttggtcagggtggtctcgaactcctgatctcaggtgatccacccacctcggcctcccagtgttgggattacaggcatgagccactgcacctgggctttatttatgtatgtacgtatgtatgtatgtattttgagatggagtcttgctctgttgcccaggctggagtgcagtggcatgatcttggctcactgcaacctcctcctcccaggttcaagcaattctcctgcctcagcctcccaagtagctgggattacagaagtgcaccaccacacacagctaattttttatatttggtagacgtggggtttcaccatgttggccaggctggtctcgaactcctgacttcaagtgatccgcctgcctgggcctcccaaagtgctgggatcatgccaccgcgcccgacctttttattttttctttttttttgagacggagtctcgctctgtcgcccaggctggagtgcagtggcgcgatctcggctcactgcaacctctgcctcccaggttcgagtgattctcctgcctcagcctcctgaatagatgggactacaggcacacgccaccatgcccagctaatttttgtatttttagtagagatgggatttcaccatgttggccaggatggtctcgatccacccaccgtggcctcccaaagtgctggaattacaggcgtgagccaccgcgcccggcctattttttttttttaaagggacaaaattttttttttttttagacggagtctcgctcagtcacccaggctggagtgcagtggcatgatctcggctaactgccagctccgcctccagggttcacaccattctcctgcctcagcctcccgagtagctgggactacaggcgcccgccactatgcctggctaattgtttttgtatttttggtagagacggggtttcactgtgttatccaggatggtcttgatctcctgacctcgcgatccgcccgtctcagcctcccaaagtgctgggattacaggcgtgagccaccgcgcccggcctaaagagacaaagtcttgctctgttgcttggcctgcagtgcagtgatgcaatcatagctcactgcagcctcaaactcccaggctcaagcaatccttcacctcagcctcccgagtagctgcaactacaggcgtgcactactatgcccagctaattttatttgtacagatgggtctttctatgttgcttaggctgttctcaaactcctgggctcaagcgatcctcctcccttgccctcccaaacagtgggattatacccactgaggctggccaagtttccttctttgtaaaaaggggtaacagtactgcttccagtagttggcaggaagattagaatagtggctagtatgtgatgagtgcttagtaagttttgggtgctatgacaataatgacaagaatgatgttgctcctctggccaggtaagccggcacccaatgacctcaactgccctcttggtcaggaaggccaccccattgtgggaagtcattccatttcagacagtgctaagggcaatgaaagaaagaaatgggacagaagaatgaacactaggggagaagggcttctgtagaactcggggtgagcccgggagtgttaggctggcctgtctctggtgacacgtgagcagagatttgaggctgcagcctgccttgaagatctgggagaaaacagctcttggctaaagacggaacataagcaaaggccctgaggtgtgcacggcctggaatgcccaaagaagacatgggggcaggcagggtgtgggggctcatgcctgtaatcccagcactttgggaggctgaggcaaaactgtttgagatcaggagtttgagaccagcctgggcaacatagtgagaacaaaacaaaacaaaaattcattaattttgggctaggcgtggtgctcacgcctgtaatcctagcactttgggaggctgaggcgggagtatcacttgaggtcaggagttccagaccagcctggccaacatggcaaaccccatctctattaaaaacacaaaaattagccgagcgtggtggcgggtgcctgtaatcccagctactcaggaggctgaggcaggagaatcgcttgaacccaggaggtggaaattgcagtgagctgagatcgtgccactgcactctagcttgggcgacagaatgagactgtctcaaaaaaaaaaaaaaaaaaaaaaaaaagccaggtgcggtggctcacgcctgtaatcccagcactttgggaggccgaggcagactggagtttgagaccaccctggccaacatggcaaaactccatctctactaaaaatacaaaaattagctgggcatggtggtatgcacctgtaatcccagctactcgggaggctgaggcaggagaatcgcttgaacctgggaggcaaagtttgcagcgagccaagatcatgccactgcacactccagcttgggcgacagagtgagaccctgtctcaaaaaaaaaaaaaaaaaaaaaaaagactgcaggtggcataatgagaacagagcttgacacatccaacaaggatggactttaatttaactcaattaatttttttagaggtagattcttccctatgttgcctgagctggatttgaactcctgggctcatgcaatcctcctgccttggcctcccaaatagccggactacaggtgcacaccaccatgcccagttctagacctaatttgatcaaatgggatgcccatcctgtaaaggctccgccgtggcctggtgtctctcatgtctcagggaggccctaggggctgacccacctcgaaggaagaaggtgtcgtgctggtcacgggctgggtgctgctggggctggaagagggcgtcaaagttccagaaggagctctcaatgaagttatcagtcggcatctcggtgaacctggtgggagacacagcctgactgccctgcctgtacccagcagaagcaccaggcaccgcccccagccctgtgctcaccccatctccaggaagatctgtcggaactgggagcggaccttgagcagcgggtgaaggtggccgctgtcggggaggacaccgtgggccaagaagttgtagggcttgaagggccggtcccgccaagagccactgggggaggatgcaagggcctggtaagggctgcccgcccctgccccctgccccagctcccacctgccctgaccctggggttgcctgctacctggagatcatctctgggctcagctctgtctcttgcttggagatgctggtactaaaggcactgcctttgctcacccagtaggtcttcagagtcctgtggccaggggaaggaaggggacgccactgccatctcctcctagaggacttccttgatctcccgtctgatgaggatccccatgctacctaccaagtcactctgctttatttccatcctgacatttatcactacctgaaatcctcctatgtgaccatgctgtatctccctgtattcactcactgattcattcaacacttactgagaacctaatgtgtgccagggtctgttcaaggtgctaagtacacgactgagtgatgatactagggaaagtctagcagatttattctgtgccaggctctgttctgcaaaagtctccccacaagccccggaaagagggcagttttttttatttgtttgtttgttttccttttttgagacagagttttgctcttgttgcctaggctagagtgcaatggcacggtctcagctcactgcatcctccacctcccagattcaagcgattctcctgcctcagcctccagagtagctgggattacaggcacccgccaccacacccggctaagttttgtattttcagtaaagacgaggtttcaccatgttggccaggctggtctcgaactcctgacctcaggtgatttgcccgcctcggcctcccaaagtgctgggattacaggcatgagccatcgtgcctggcccctttttctttgagatgggggtctctctatgttgcccaggctggccttgaattcatggattcaagtgatcctaacacttcagcctcctgagtagctgggattacacacgtgagccacacacttggcccaggctattttatagataaggaaacggagaccagcaaaggccaggtgacttggccaaggtcataaaactagttaagtgacagagcccgaacttcagttaggcatcccagctctagtctcttctctctgccactctgtgtctgctcaaaggggacatttgtcctgtgagaggacggcccctagcccatctaggttccagaggcctgtctggtgtgtgttcattaaactttggaccacactaaggacagtgaaagaaatgaacaagcaccaaagatgaagactaggggcgatgggcttcatggaactcaaggggagaggagggctgtcagggtggcctctttaaggggacacaggagagagacttgatgaggagcctatcttgaagatcagagggaaaacagttctcagcagaagggtcctcatgggcaaagaccccaaggcacgtaggcttgacaactatggcattaagcgagctgggaggaaactggccacacctgtgcttggtgtgggcaagatgtctccctcccaccatgcctccaccatgcttcgcaggtggtgggggcctgagcctgcagggggcacccactcacacttcagccaacagcttcctcttcctcagctcgctcctctccttctcccccagcttctcagcctgtcccccccggaccagctggagccgccgctgcacctcatcctccatgctgtccacctgccaggataaggagtgtgaggggtatgagggccaggggcccatgtgcccgtccacctgccccctgaccagcccgcaggaacgcaccactcggaacacccggggcccgtcagccgcactcttgtccacccgaatccacttgttggacatggccttgctgaagcccactttgccactgggcagtcgctggaaaagagaggctgcagtgagtggggcacgagggccaccttcatcccatcactcactccccattcaccccgcagctcctaccataagctcgctctgggccaggccctctgggggaatgcttcgaaacacacgggcctcatggctgccctcccgggcaatctcctcgccctccgcagtaagctcccagtgcttggtggaccgaagttcagcctcgatgacctagagggaaatgtggggagggtgtccaggcaggggtgaggctcagagccaggcaccccctttctgcagcgctgggtcccaggttgaaagcacagcccttaaagctaggttcacatcccagctatacaactttacagccaagtggtctcaagggaaagacttccccttgctgtgtctccatttcccttatgtaacacaggggtagtaataatgatagtttacacctcccagggtaaagtacaccactaaagatgttacctggcagaagacaaattctgtcggttttgaacctgtgacagattttaatgtgaaaaattaggtgaactgatatgtctccacatttttttgtttgtttttgttttctttgaaagggggtctcaccctgtcactaggctgggtgcagtggtgtgatcatagctcactgcagcctagacctcctgggctcaagcgatccttccgccagtcccgagtagctgggactacaggcatgtgccgccacacctggttaatttttaaattactttttttttttgagacggagtcttgcactgtcgctcaggctagagtgcaatggtgcgatctcggttcactgcaacctctgcctcccgggttcaaatgattctcctgcctcagcctcccgagtagctcggattacaggtgcccaccaccacccccagctaatttttgtatttttagtagagatggggtttcaccatgttggccaggctggtctcaaactcctgacctcgtaatcggccgactccgcctcccaaagtgctaggattacaggcgtgagccgccgtgcccggccctttaaattactttttaaagacagggtgttgttatgttgtccaggctggtctcaaactcctggcctcaagtgattctccttcctcagcctcccaaagtgctggcataatgggcatgagccaccatacccagcctgtctccatgtttaaatgttcacatgtcagtgcccagaatgtcagagacgggccctggaggtccacattacaaacaaaaactgaggttccaggtccagagtcatgaagacaaggacaacaagggtaagtagagtgcacagggcctggctcccacttcattctaatcccaactctgcccttcacttactgtgtgacctcaggaaagttgcttaacctctcagtgactcttctcatccataagagaaaggtgtgatgggttctacctcagatgattttaaggagtagctaaattaatactcagaaagaatatatagtgcctaccacgtgacaaacactgcataaattttttttttttttttttttgagacggagtctcgctctgtcgcccaggctggagtgcgatctcggctcactgcaacctccacctcccgattcaaacaattctctgcctcagcctcccaagtagctgggattacgggtgcccaccaacacgcctggctaatttttttttgtatttttagtagagacagggtttcatcatcttggccaggctggtcttgaactcctgacctcgtgatccacccgccttggtctcccaaagtgctgggattacaggtgtgaccactgcacccggcataaattctaattactataattatttttatggctattactgtcattagattgaacctcacctccttatattatttaaccctctgtgacgtatacaaatgtcagatcatattggtcaaggcactgtcaccccacacaacacagctgccatctctcctctgcattgaggactatgggctctgcagcctgagtgcctaatttcaaatctgggctcatcggcctcttctattcacactgattatgttactgaccatcagttgtcacatctgcaaaatgggaataacatggccatcagccaggattatggaatggattggacaaacaagctgagaccaaagtggggcacagaacatgagctctacggataaacagcccagatcctggccccatggatctagccttctgggtggcccacgggcccctcagcatcctacgcctgtgactctgtcactgtccacttgcccaagtcagaaggctggacttcatctgtgcgccccctgccttgtcctgaatcccacgccttccccacctcccccaagcttccttcccatagccagacatcatgccctccagcttggggaagtgccagcttcttctttcatcccttcacctccagtcctgtccatgccaattcttcccaaaggtgatgtggatagcacactcatctgaccggctctagctcctgctatcgcttcccagttccctcatgaggtaaagacctaagaggctttgcaattacagctatgctggtctcccttgccgcctgccatcccccaagatcccggccactgatctctaaagtgctatcactttcctcaacagagaacagactcagccgtcacctgcaccaggccgctctccctgacccccaaggctgggtcagctgtcacagctgggtcccctgttttcccccatcactctggttcttgaagcaccttcctattacgtcgcaacctgcgtgagggcagcaaccgcgacttcctcgtccatcatcgtaccctctacccacgctgaccgtgcctcaataaacgtttattgcatgaggaacatccgtgcgtctgggccctcactcgtcccacttcccgcccgcacatcccggagtggacacatatacagctaccccaaactaggcctgagggaatttggcttggacgtagagcgcccgtggcaaggggactgtaggtgcaagggcaaggcggtccggcatcacgggcccggctcacctcgcccagcgcctgaaggctcttcacggcgcccaccaccgcctggtgctccatgcccagctcagccgccaactcggcgctgtccaggccgccatcagacgcctccagccgccggagcagcagttccgccacctgaccatccgccatgactccttccagtgtgctcagcgtgtccgggcccgggtgggcggggggagctgagccaccggaaccggaaccggagtgtgtaccgccatcttgaatgtgtctaactgtagaacagggctcaatgtgtcgtcatcttgagtgtggcgacggagccgcaaaaggtgcatgggactcagttcccacctccaccctggctccatcaatggcgtctggttgaccagaggggtaaaattgattatctcaaggtcagaagcaccgccctgttttgagttttatctagcctcacttcgagcgggctgtgtgaccttggacttccccgtctctgggttacagaaccctctgcccttctggtattctctcttgccctaggagaggcggtgggtggtgggctccagagatggtcattttggcgatgtcagctacttttaaaatttcaaaggaaggctgggtaggtaccgtccctttttatagagggaaaaggaattcacctagtaagtcaaggtggcacctaacctgtgtggactacctcgtatgtggtagtacttagcccagaactgagtacttcacgtgtagtatttcatttatccccaaaactttatgatgtagatactgatataaccgcattacacatgtgagaaaactgaggctcagagggtggtatgacttgcccaaggttctacagagagttggtggaaatgaagtcataaattataaaccttccagatcctcccacccctgtgcgctgagagtaacgtcagtgcaaatactgcatggcctagattagcactgtcctatagaaacacagtgcaaaacatctttcttttttgagacagggtcttgctctgtcacccatgctggagtgcagtggtgcaattatggcttactgcagccttgacttcccaggctctaaggatcctccaaccttaggctcctgagtagctggaactgcaggtgcgcgccaccacacccagctttttttttttttttaagtatgggttttggccatgttgcccaggctggtctcaaactcctaggctcaggttatcctcctgcatcggtctcccaaaatgctggcattagaggcatgacccacctcgcccagccagccagaccctgactcttacaaaaaaaaagatgactaataaaatattttgcactcggccgggcacagtggctcacctctgtaatcccagcactttgggaggccgaggcgggtggatcacctgaggtcgggagtttgagaccagcctgaccaacatggagaaaccccgtctctactaaaaatacaaaattagcagggcgtggtggcgcatgcctgtaatctcagctacttgggaggctgaggcaggagagtcgcttgaacctgggaggcagaggttgtggtgagccgagatcgtgtcattgcactccagcctgggtgacaaggcgaaactccgtctcaaaaaaaaaaaaattgcactttttttcatactaaatcttcaaaatctgatgcgtattttacacttacaacacatctcagttcggaccaaccacatttcaaatggtcagtaatcacatgtgggcagtggtgacttacgtcagcacaggtagattagaatcctagatctgctggccaggctcagtaatcccagcactttgggaggctgaggcgggtgaatcacctgaggtcaggagttcaagaccagcttggccaagatggcgaaaccccatctcctctaaaaacacaaaaattagctgggtgcagtgggggtgcctgtaatcccagctacacgggaagctgaggcaggagaatcacttgagcctggtaggtggagcttgcagtgagcagagatcgcaccactgcactccagcctcggtgacagagcaaggctctgtctcaaaaaaaaaaaaaaaaaaaaaaaagaatcctagatctgttatttatgtcattcaaccagaaggtgtagtctttctgtgcctcagtttcttgctcacatggaggtgattggagcccaggttactgtgagaattaaatgcccacacatattcacactgcttactaaattgagtgtggcccatgttcgaacactcttataagcagaacacatttattccttttacatcacaattattatttgagtctgtaaaatgggattactcatatccccaaatcctgaccctatatgaggttctgtattaaggatacatttctcaaagtcccttctctcctcccattttatgttgattatttatttatttatttagggagtgggtctcactctattgcccaggctggagtgcagtggcatgatcttggctgactgcagcctccacctcctgggctcaagcaatcctctcacctcagcctcccgagtagttgggactacaggtgtgtaccagcaggccaggctaatttgtgttatgtatattatatattatatgctatatataatatacatactattcatatatttatgcattatatgtcatatataatatattacatatgtgtacatatatatattttgtaagaatgaggttccaccatgttgcccaggctggttttgaactgccgggctcaaacaatctgcctgcctcaggttcccaaggtgctaggattataagtgtgaactaccatgtccggcttatttttatttatttttgagacagggtcttgctctgtaacccaggctagagtgtgcagtggcaacaacacagctcacggcagcgtcaacctcctggtctcaagtgatcctcctgcctcagccttctgagtagctgggaacacaggcaggcgccaccacgcctggcaattaaaaaaaatgtttttgtaaaaatggcctcctgctatgttgcccaggctggtcttgaactcctggccttaagcattcctcccatcttggcctgccaaagtgttgggattacaggcgtgagccactgtgccccgtgtgtttttagttaatttccacaagagtccttccttcctctcttctatcatgcagcaagtactttttaagcctgttctgtgccaggtgctgcaggtgacactggaggatgcgaagtgaacaaaacaggcagtgtctaacctcaagtaggaagcgccaagcccacaggtgcctgacacaggaacaggaggaagggtcagcaagaggcctgggatggtccccgggatcctcatgggggggaccagactaggcaatactgaatactacctagaggaagtggtagaaccccaacttcccagttcattctcccccgtctttttttcgagatggagtcttgctctgtcacctgggctggtgggctggagtggagtggcgtgatcttggctcactgcaatctctggctcccaggttcaagcgattctcccacctcagcctcccgagtactgggattagaggcacccgccaccacgcctggctaatttttatttatttatttatttttatttttagtggagatgggttttcaccttgttggccaggctggtctcgaactgacctaaaatgatctgcccgcctcggcctccccaagtgctgggtttacaggcgtgagccactgcgcccggccaccatttcttttttttttttttaaccagagacccttgccaagtcattccccccactccactttattttccttttcattttttccttcctctcttttctgagtcacaaccattagccaggaagcaccccctccccaccctctttcctggatccccctcattccctccttccatagtccactcccgcgctcccaggtccagggcttatttgcccagagtttggaaaacccccagctctccttcctcctttctacagcgtgggggcagggtactggtgccagtcacgtgcctctggcttctgaagaagactctagactggggtcggggggtgggtcctgcccatctccctagcatcttatcgtccctaccatctgtgtcttttttccctccccaaacggaaccccctgccctctcgcctgcctatagccgtttaattgcaaaagccaggccgtttgtgggagaccacagacagcgacccccttcatttaccggttgagaggagggtaaaggggcggctgcaatctgggtaataaccctatccccactccagaagtcacagtcacatcgttaagccttcctcccctcttgtcccaggacagctttaaaaacgttaaaagcatttctgctgggtagcatctggccagggtcgccccctctgtctgctcaggaacgtctgtcacttcagagagcttaagtgacttgccccggtcacacagcagcagtccgataggctgccagggctctaggggcagaaggaggagagggctggcattcttcccaccggcccgcgtgactgtagcaccggggtgcagcgaagccccaagggccccaatccgtgagctctctcccatcccaggcaggggtgggggagcagcagtggggtgctggttctcaaatgcaagataagagctggctaagaaagccttgcccagcccctccacctagagggaatgggagggagagaagctgagggcagggtcccggtcccgcgtggagacagctgcgctcccgcggtttctttaaacgcccagatgggcaacgacgcgcgcggacgagggcggggttgggttcaggtctggtcacatgacctggcctgaggtgctcgcggcccccaccccaccagtgggcgtcccccccacgcgtggtcgaccatcattggtcggtggtgaggccaatagaaatcggccatctgggaacccagcgttccgaggcgcagcctaacatagtgaaccgacgaaggtccaatggaaaaagacggccatgggcatagaccaatgacaaagtggcaggggcgggcccaagggctgggtcaggttggtttgagaggcgggtgggtataaaagtgcaaggcgggcggcggcgtccgtccgtactgcagagccgctgccggagggtcgttttaaagggcccgcgcgttgccgccccctcggcccgccatgctgctatccgtgccgctgctgctcggcctcctcggcctggccgtcgccgagcctgccgtctacttcaaggagcagtttctggacggaggtaacgcctggtcccgcctcgaggccgccccgacgacgcggccggcccccgatcctggatctgcgttgtcgcccgtaattaccgtttagaggtccaacacggtggcctcccgggactagagccgcgggcgatttctcttctgcgtccctggggagcgcggagggcgtagcggcctcccgcggcgggagttagggttagcccgaggatctctgaaggcacccgacgtgtcaaactagaggttggaatggggagtgtcggggatctcctttcctgtccccagcagcttgtggctctcggcagatgtttggtgtggggggggattagcacagccgctctgacctacccctctaatcccccacttagacgggtggacttcccgctggatcgaatccaaacacaagtcagattttggcaaattcgttctcagttccggcaagttctacggtgacgaggagaaagataaaggtaagagcctaggagtgggtgctcagatccgggaggacttcctggcagaagtccttgtctgtacacacacagccgggacagtccccttggaggaggacaggtggaggaagtgggggagtcttctctattctctaagtcgagggtcctcgcgagtcaaggcccaacggtgacctcactaccgtcccgtctcaggtttgcagacaagccaggatgcacgcttttatgctctgtcggccagtttcgagcctttcagcaacaaaggccagacgctggtggtgcagttcacggtgaaacatgagcagaacatcgactgtgggggcggctatgtgaagctgtttcctaatagtttggaccagacagacatgcacggagactcagaatacaacatcatgtttggtgagggcctgcttcctggtgctgatctctgtcccattagttagagggagacccagaccccattgactttcttaataatgattttttttggaaggggagctaaaagaataagtcccagcaacaatttattgcattatgatcgcagatctaggctgttaatttaatttgcgtgtttgtatatagttatttcccaatcttactaatgaggattttgagttctagagcactgattttttttttttctcctttaaacttaaggctccacccacagcccattcaggacagaatcagggtctgagtttctcttctcagccttgacagacccgagttgaagaaccaggtcttccttttataaagaggggtgagagcctcgagatgatgggtagtctctgactcttaactggatctgcttcacacctaggtcccgacatctgtggccctggcaccaagaaggttcatgtcatcttcaactacaagggcaagaacgtgctgatcaacaaggacatccgttgcaaggtgtgcctgggggtggtggcaaatggctgtcatggggagattcagaggtcagcctcattggggggtggcccccgctcaccttcttccttcttcaggatgatgagtttacacacctgtacacactgattgtgcggccagacaacacctatgaggtgaagattgacaacagccaggtggagtccggctccttggaagacgattgggacttcctgccacccaagaagataaaggatcctgatgcttcaaaaccggaagactgggatgagcgggccaagatcgatgatcccacagactccaagcctgaggttggtgtttgggcaggggctctgctctccacattggagggtgtggaagacatctgggccaactctgatctcttcatctaccccccaggactgggacaagcccgagcatatccctgaccctgatgctaagaagcccgaggactgggatgaagagatggacggagagtgggaacccccagtgattcagaaccctgagtacaaggtgagtttggggctctgagcagggctggggctcacagtggggagtgcaccaaccttactcacccttcggtttccttctcccttctgcagggtgagtggaagccccggcagatcgacaacccagattacaagggcacttggatccacccagaaattgacaaccccgagtattctcccgatcccagtatctatgcctatgataactttggcgtgctgggcctggacctctggcaggtgagacttggaggaaaaaggaggatccctggggtacctcaagtgcataagatcacccaagaggaaagggacagggtaggcaccccaggtgagtctgactcaaaaatggtacttcttgtaaacagtacttcctggtctgtccctgtgaagtcctcacagcaacccctttaaggttatacttgctgtgcaccaagtacttccccaagtacttttatgcaaatcaacttctttacccccaaagacctagaaggtggtcaggtaacccagttagttagctggggctgggcacagtggctcacccttacaatcacggtactttgggaggctgagacagaggattgcttgaggccaggagttacacaactcaacctagcttggcaacacagcgaggagaccctatctctacaaaaaaaatttttttttttgagacagagtttcactcttgttgctgaggctggagtgcaatggcacgatctcagctcactgcgccctccgtctcctggtttcaagcgattctcctgcctcagcctccggagtagctgggattacaggcatgtgctactatggatgccaggctaatttttttttttttttttttttttgagaccgtgccttgctctgtcgcccaggctggagtgcagtggtgtgatctctgctcactgcaagctccgcacgaccccccaggttcactccattcttctgcctcagggtcccgagtaactgggactacaggcaccccccaccatgcctggctaatttttttgtatttttttttttagtacagacatggtttcaccgtgttagccaggatggtctccatctcctgacctcatgaaccacccaccttggcctcccaaagtgctgggattacaggcgtgagccacctcacccagcctttttgtagagacagggcttcatgttgcccaggttggtctcgaactcctggcctcaggtcatctgcccgcctcggcctcccaaagtgctgggattacaagggttagccaccatgcctagcctctacaaaaactttaaaaattggcgagatgtcatgcatacctgtagtcccaactaccaaggaagaaggatgatcacttgagcctggggcatcgaggctgcagtgagccatgattatgtcactgcactccagcctcggtgacagagtgagaccctctcaaaaaaagttgggacttggccggacacagtggctcacacctgtaatcccagcactttgggaggccaaggcgggtggatcacaaggtcaggagatggagaccatcctggctaacatggtgaatgaaaccccatctctagtaaaaatacaaaaaatttgccaggtgtggtggtgggcgcctgtagtcccagctactcgggaggctgaggcaaaaggatgacgtgaacccgggaggcggagcttgcagtgagctgagatcatgccattgcactccagcctgggtgatagcgagactctgtcccaaaaaaaaaaaaaaatgctgggactgaatttttgtctgttttggtcactgaaataccttctgtgcccaagacagttctggcatgtagtaggtacctgaaaaatacctgaataagagagtgagaaacaagaaacaggtgcagagaactgaagtcagtggcccaaggtcatgggggtaggaaaccacaaagctggggtttgaacctgggcagtacagcacctgagtctctccatctttttttttttttttttttaagacagagtcttgctctgtcacccaggttggagtgcagtggcttgatctcggctcactgcagcctctgccttccaggttcaagtgattctcatgcctcatcctctcgagcagctggaattacaggcatgcgccacgacgctgggcttttttttttttgagatggaatttcactcttgttgcccaggctggagtgcaatgatgcaatctcggcggctcaccacaacctctgcatcccagattcaagcgattctcctgcctcggcctcctgagtagctgggattacagggatgcgccatcacagaccccgggctaattttttttagtagagacagagtttcactatgttgcccaggttggtctcgaactcctggcctcaagtgatccgttcgccatgacctcccaaagtgctgggattacaggcatgagcccgtcccgtccctggctgtctctccatctttccatcttttttttttttttttttttttttggagatggagtctcactctgtcacccaggctggagtgcagtggcacgatcttggctcactgcaagctccgcctcctgggttcacatcattctcctgtctcagcctcccaaatagctgggactacaggcacttgccaccacgcctggctgattttttgtatttttagtagagacggggtttcaccgtgttagccagggtggtctcgatctcctgacctcgtgatccgcccaccttggcctctgggcgaggattacaggcgtgatccacctcacctggcctctccatctttttaactgcagtgtcagcggtgttccttgtcttctctgcagatgcaggcagcagaatatagtggttataggaacacaggtggaaaccctgtccaaagcaagggctatcgggtatcacctctgaccatccttcccattcatcctccaggtcaagtctggcaccatctttgacaacttcctcatcaccaacgatgaggcatacgctgaggagtttggcaacgagacgtggggcgtaacaaaggtgaggcctggtcctggtcctgatgtcgggggcgggcagggctggcagggggcaaggccctgaggtgtgtgctctgcctgcaggcagcagagaaacaaatgaaggacaaacaggacgaggagcagaggcttaaggaggaggaagaagacaagaaacgcaaagaggaggaggaggcagaggacaaggaggatgatgaggacaaagatgaggatgaggaggatgaggaggacaaggaggaagatgaggaggaagatgtccccggccaggccaaggacgagctgtagagaggcctgcctccagggctggactgaggcctgagcgctcctgccgcagagctggccgcgccaaataatgtctctgtgagactcgagaactttcatttttttccaggctggttcggatttggggtggattttggttttgttcccctcctccactctcccccaccccctccccgcccttttttttttttttttttaaactggtattttatctttgattctccttcagccctcacccctggttctcatctttcttgatcaacatcttttcttgcctctgtccccttctctcatctcttagctcccctccaacctggggggcagtggtgtggagaagccacaggcctgagatttcatctgctctccttcctggagcccagaggagggcagcagaagggggtggtgtctccaaccccccagcactgaggaagaacggggctcttctcatttcacccctccctttctcccctgcccccaggactgggccacttctgggtggggcagtgggtcccagattggctcacactgagaatgtaagaactacaaacaaaatttctattaaattaaattttgtgtctccctcctgtgtctccttctggggaaagacagacttaaggaaacccagcagtggtctttttggggggggggggggtttccagtatatctcctttttcagctattgctagagaggttgctgagtgttccacaagattccagggacccttatttaccccataaccctcaaaaccaacgggggaatggctgttgctgctgtaaatactccacatactaacttactgaatccttgaacctaactggtaagttttggttctgcttatttatttatttttaagatagactctcgctctgttgtccaggctggcgtacagtggctcaatctggttcaccctgccccttaaactggcctttttcatgcttctattcctttggggtcctgtggctcagcccaacccctctgggatgcctccaggactggtagatccaagggagaattctgtatttaatgtagtgaggctttgaaagttaacatctttaaatacttctggggtcagattaggtatagtacaacaaagtactcctgcccggagacccaagaatgaaaattgtaggttcattccaaaactccagatccctaaagaatgaatgaggctacaaaatggcaccttgcccccgcttccaacttaaggttttttttctgtgcttggtggcctttcaggtatttctagttttgagtaactttcactttgactgctctacaagggttcctgccaggatacccagaccagaataaaactcatttgggggccgggtacggtggttcacgcctgtaatcccagcactttgggaggccgaggcgggtggatcacctgaggtcaggagttttgagaccagcctggccaacacggtgaaacccaatacaaaaaattatccgggcgtggtggggggtgcctgtaatcccagttactcgggaggctgaggcaggagaattgcatgaacccggaaggcggaagctgcagtgagccgagatcgcgccactgcactccagcctgggtgacagagactgtttgaaagaaaaaattctcatttggaagaggcaaaatgaggtttttacagaagaaatacaaatgtctgtaaccagtacaggtacataaaaactttgttaaaaattcatttgagcgtgagagtggggacaccagagtcactttgcagccccgtgacgtcaccgataacgggcatggcgtcactcaggagaccacgtgtgcgggccgagcaagaagccccgcccacagcgcggagtttagtctgcgcgtgcctcgctcgagaacgcgctcgtgcgcatgcccacaaaggccaaggagggagtgcgcaggtcacgtgcgccggtggtcagcgcgcgcattgcctgccccggaagtggtcggcgcgcggcgcggcgcgcctgggcgctaagatggcggcggcgtgagttgcatgttgtgtgaggatcccggggccgccgcgtcgctcgggccccgccatggccgtcaccatcacgctcaaaacgctgcagcagcagaccttcaagatccgcatggagcctgacgagacggtgcgggccgggccggagcccgggggcgggagcgacgggtttcgggggtggggtgggggcggggaggctagaatcccaacgggaggggcagggaggacggcgcgggtcggccctgcccagacccccgacctgcccgactttcctggaccccccgatggtctttggcccagcccccagccgatcgggcggcgctcctgcgccggtctccgggcgaggccccacccccggggcgctggccaggccccggctccaatgtcagcgctctcgcggggcgcgggagtcacaagctcggattcctgggcaggccaagctctccaagactgggctccacgttcccagctttgcaggcgtctccttgggacactggtggtcgaatctaggagtaatgaccaggagatactgagtagtgacgacaacaacgatgttaatgataataaacgggtctcagtctttataattttggtggtccgtgtttgttggccgtttactttttatcagtcaccgagtgttgtagtgttgttttaccgctctgcaaaacgggcttgtcattggggacctctgatcattttacagatgtggaaacctagggattgaggaactttgccacagtcacacacaagtaatggcagagctgggattcaaattcggttctgcctcgtgtgagcgtccacgatataaatattatgctgcctttttagtcaaaagtagaattaggacctaattcaaacatactgaatgtctattgggtacttggcgctttttgcatagtgagggagacattgaagtccactttttgtagaaaaggaaacacacattttttgatccgctcaagtgtttggctttgggcaagttaacctgcctacctgtctgtgcctccgttttctcaaatatcaaatgaaccggtcgcctgctggcttccgcctgtaatcccagcacttagggaggcagagggaagaggagcccttgagcctaggaattcgagatcatcctggcaacacagtgagaccccgttctctacaaaaaaaagaaacaaaaatcaataaataaaatgagaccaattaaacgtatttcataggaaacttaaaaggtatgacacatatacatttacagtagcactattggccaggcacggtggctcatgcctctaatcctgatgatttgggaggcagaggcaggaggattgcttgaggccaggagtttgagaccagccagtctaacatagggagactcttatctacaaaaaaaaattatttttaattagtctggagtggtggtgtgtacctttagtcctagctactcccaaggctggacaagagtaccagttgagcccaggagtttgaggctgcagtcagcgatgatcgtgccacatcaatccagcatgggcggcagcgagatcctgcctcttaaaattaaaaaatatcactattaactattagtcacttattgtccaaggtagagtgtagagtgggggactgtcccctttattctgttaattatactttatactacccgaaattacattttcttcacattagtgttctctcattgagagcagggacttacttgtgttgagtttgttctgtgctgtggcctctgtgtctaaaacagcacctggcacataatgggtgtttagtataagtaaatactgtgttgaatggcatgatgattgaatgaattcaaatctagcatgctttagatgctgagaaagcttaaaaaacccagcgtgcttgcctttctgccatcagggctggcagtttctctgtcctaaactagaagggaaaagagaatcttggggtctccagtgactgtctgtaccactccctctaggtgaaggtgctaaaggagaagatagaagctgagaagggtcgtgatgccttccccgtggctggacagaaactcatctatgccggcaagatcttgagtgacgatgtccctatcagggactatcgcatcgatgagaagaactttgtggtcgtcatggtgaccaaggtgggtgacgtgtgctggctgggagggtgggtggacgagctggggagctggcaaagagcctgtgtgcccaggagagattagctgtgaacagggcggggccacagcggagcgggttgttgggtctgatagggttgctgatgccagctccctttttcttgctgttgcagaccaaagccggccagggtacctcagcacccccagaggcctcacccacagctgccccagagtcctctacatccttcccgcctgcccccacctcaggcatgtcccatcccccacctgccgccagagaggacaagagcccatcagaggaatccgcccccacgacgtccccagagtctgtgtcagggtaaggcgggggcagcagtcccagcttgggccctgtcctcctagcacattccagcgtccacataagtggtcccacacacctggagggagggcaagccgccagaagccagggtccgatttctctctcttgaatttgcagctctgttccctcttcaggtagcagcgggcgagaggaagacgcggcctccacgctaggtgggtgggtggtccccagggcagaggtgactgggtgccccagccatcagctgggccttgtctgggtgcgggagggcctgggagctgccctttcctcttcctggtgacctaggctttgctgcttcctccacagtgacgggctctgagtatgagacgatgctgacggagatcatgtccatgggctatgagcgagagcgggtcgtggccgccctgagagccagctacaacaacccccaccgagccgtggagtatctgctcacggtgaggtggggcttccgcctcccggggaggccttgagggagtacccgggcgtcactgccctgatgggcggttgggaaggcaaaacctgccctgaaaagcctttgggtagtgattctagccactaaaggcttcccacaggaggctggatgtgagtgatgggtgggcctctggagggcagggccgaggcctcatctgtgtcctgccagggcatggaggagggtggcagcaggaggtctgtgcattagaactaaacaggacccctgacagggaattcctgggagccccgagccggaacacggttctgtccaggagagccaggtatcggagcagccggccacggaagcaggtgggtgtgcacatgccgcatctgccctccaggtacctgactcacattacactccaccccgcagtgctcctaggagcccggcgtggtgtctgactgcaccccttcctactaccagcaggagagaaccccctggagttcctgcgggaccagccccagttccagaacatgcggcaggtgattcagcagaaccctgcgctgctgcccgccctgctccagcagctgggccaggagaaccctcagcttttacaggtgtggtcccaagggcagagggagctagggcagccaccatttcccttccctgtgggcaccagagtccataacacgtaggaatcgttctaggtccggaaagcaggactaagcacatgcttcccccacgcccctgtgcttcctgtgacctggtgacccccctggtttctcagtcttcccaaccaccttgtaaggtgtgggtgctgtcaacatcacctcccacagaagaagacaccggaaacttagagcagcctgtcattcccagggtcacgcagctggtagtgtgtgtgtctgcctcctgcctcggggtggggtcctgggctggggctctggcttcacatacagatggtgctgcgtaaatgtctgtaaggtggcatgacgtcacccaggacagctgtgccccagttggctctgggacaactctgctcagtgaggctccatcttgcccttgaaggttcacaggaagagtgggggagtggccccctgggtgcaagtaggttcctctgggttctcggtgaagtgcctaccggtcttggctcaggaccctgctgtctgacccttctcctctcacttctcagtcccttgccagctcctcctggtcggtcgtgttcttcatctgcactcagccctccctcatagtgtcctggggccttcagtctgtatgggaacccccaaatctatgtagccagcccaggcctctctgaatgccacactccatggctggcttaattaactctccatcaaagtgctccctagactagacgtctaagacttagaacagacctccccagtcctccccgatctctgcaaggattagcttggggttgcttcagccccaggccctggggatctgctggggtctaccccttgtcctgtctgctcttcccactcagcccctccctgcactccagctctctggtagcctcttcctgggcctctgccactgcatagtcccacagtccacttttcaaccatgaggcagatgactaaaaagcactttcttttctttttttttttgagaggaaatctcgctctgtcgcccaggctggagtgcaatggcgcaatcccggctcactgcaacctccgcctcccgggttcaagcgattcttttgcccccgcccgagtagctgggactacaggcgcccgccaccacgcctgactaattttttgtatttttagtagagatgggatttcaccctgttagccaggatggtctcaatctcctgacctaatgatctgcccgccttggcctcccaaagtgctgcaattacaggcatgagccatcacacctggctgactgaaaagcactttcttctttaatgtgaaaatgatcagatgcatacaatggtagagttatatcagagcttccagatacccaggtagggcacagtggctcatgcctgtaatcccagcactttgggaggctaaggcaggcagaccacttggtcaggagttttagaccagcctggccaacatggcaaaaactcgtctctactataaatacaaaaagtagctgagcatggcggcaggccactgtagtcccagctactcaggaggtggaggcaggagaatcgcttgaacccaggaggcagaaattacagtgaaccgagattgccccactgcactccagcctgggtgacagagtgagagtgtctcaaaaagaacagaaacaaaaatgaacaaatgaacttccagatacctaaatccaacacccagatgagttcactttttttggtttgggggctggtaggtgggaatagagacagggtctatgttgcccaggctggttttgaactcttgggcccaagcagtccctcctgccttgcctcccaaattgttgaggttacaggcgtgagccaccacacccggccaagttcacctttctaaaagatccacagaccacgtcttttcccatgtaactgtcaccaccgtggcttccccctgctctagaaaatgggtctgacttgggccttcctctctggtgtcattgtctgcctcctcccccttcccttgttcgctgttttttgttttttttgttgttgttgtttgtttgtttttgagatggagtttcgctcttgttgcccaggctggagtgcagtggcgtgatctcagctcaccgtaacctccgcctcctgggttcaagagattctcctgcctcagcccccagagtagctgggattacaggcatgtgccaccacgccctgctaattttatatttttagtagagatgggatttctccatgttggtcaggctgctctcaaactcctgacctcaagtgatctgcctgcctcagcctcccaaagtactgggattgcaggcatgaggcaccgtgcccagccccattcactctgttcctgcttctgtttctgagacttcccagatgcatccaccctgggcctttgcacttgctgtttgctttacctggaggaaaccctctgcatccgccatactgcaggcctctccaccagccctcatctgcagttccttcctagccagacacttgcagttgtctggttcatttattggctcactcacttattttttgagagtctcttgcccaggctggagtgcagtggcacagtctcggctccctgcaacctctgcctcctgtgttcaagtgattctcctaccttagccttcttgagtagatgggattacaggcacgtgccatcacacccagctaatttttgtattttagtagagacggagtttcaccatattggccaggctggtctcgaactccaggctggtctagaatcacctgaagtgattataggtgtgaaccactgcagccagcctatttatgtatttatttattcaagacagggtcttgctctgttgcccaggctggagttcagtggcttactgcagcctccgcctcctgggttcagtcttatgcctcagcctgccaagtagctgggattacaggcgtctgccaccacacctggctactttttgtattcttagtagagatgggggttcaccatgttggccaggctggactcgaactcctgacctcaagtgatccacctgcctctgcctcccaaagtgctgggattacaggtgtgagccaccgtgcccggcttatttcttggctcacttaaaagcacatcatcagctcttccagggtagggcttgtgtcgactgctatgttgtgtttggccagaacaggctcctctggatatttgcctgactgaatgaaaaagcaagggctgtgatgacctggggagaggaggggaccagggctgtgaattaccttcccttccccaccctctcctgcagcaaatcagccggcaccaggagcagttcatccagatgctgaacgagccccctggggagctggcggacatctcagatgtggagggggaggtgggcgccataggagaggaggccccgcagatgaactacatccaggtgacgccgcaggagaaagaagctatagagagggtaagaggcctggctgaggggtgactgcaggtgggcaggacccctaccctctcctgctcacacttaacctatcttcccacagttgaaggccctgggcttcccagagagcctggtcatccaggcctatttcgcgtgtgaaaaaaatgagaacttggctgccaacttcctcctgagtcagaactttgatgacgagtgatgccaggaagccaggccaccgaagcccccaccctacccttattccatgaaagttttataaaagaaaaaatatatatatattcatgtttatttaagaaatggaaaaaaaaatcaaaaatcttaaaaaaacaagcaaacagtccagcttcctgtcctcctaaagtggcccctgttcccatctcccgggccagacagctgtccccccgtcctcctccccagcccagcctgctcagagaagctggcaggactgggaggcgacagatgggcccctcttggcctctgtcccagctctctgcagccagacggaaaggcggctgcttgcctctccatcctccgaaaaacccctgaggacccccccccatcctcttctaggatgaggggaagctggagccccaactttgatcctccattggagtggcccaaatctttccatctagggcaagtcctgaaaggcccaaggccccctccccagtctggccttggcctccagcctggagaagggctaacatcagctcattgtcaaggccacccccaccccagaacagaaccgtgtctctgataaaggttttgaagtgaataaagttttaaaaactagccctatggtctgtgcctgctggggctccccgcgcccacctgtctgggtcttggggggctggctgggcacaggcaggcatggtgacgggtgcctggaagggggagaggagtctgtgagtccctgcagattgaggcttccggtgtctcctcccccagtgtgtcatttccaggcagtggaccccagcccaacgttacaaggactgcttctccccggcccccaccatcatcaccacagtctgttttggctatacttccccccccaccagccttgtaattggctaattactggagatgaatgttggtaaacagaagccttcttctcttctgccatctgcttctccattatttgcccattgtacaccccccttttcctcccactgaagccccagttagtcagcagggcctagagtccctgtccccttttgagtacagccaagtgggggattccccagctcttaagtattgggggaggaaccaggggacccagagaggcacaccttgagaggacgcagatctcttcaggggtactgccaggtagcaggctttattgggaagggacaaagcctcaggagctgggtgccccagaggctgctgggtcttgagccacagctgcagccaatgcagcagctcgcgcctccttcttccgtttctgtttttcctccttgaggcgcttgcgctccttcttctctaggtcctggagcagctcctggaagcgggcactccttgggtccacctggtagcccaggagctcctgggcctcagcctgcagtcgggccctcctctccttgtcagcctgggccttctcccagttctcccgctgctgctgctgccagttcacaatcatctgtggcatcttggccatgcactctgcgatgtgctgctccctgcaggggagggagagtgggctgtgacactggcactcagccagggcagagcccacccacccatatctcacccataggcctttgcccacgagcctgcctcctcaactcccccagtagattaactgtcaggaaaagcccttgacaagtgaagaaacaggaagagatgatgagaaagttacctgtgcatgaatttgatcacaagggcatgtcaagccccagtaaaccccaggtgccaaagccaaatcagcatttcactgagctgcctactgagcaagccaagtgccactcccatggataatttcacacctttatttcatagacattgctgagcacttcctgtacagaggccaggcccaattctaggcacaggagtgaaagcaagaaagacatttcccaccaatccttgagtttgtagctaccagtcacagccccatttttttcttttaagttcaggggtacaagtgcaggtttgttacgtaggtaaacttgtgtcatggggtttttttgtacagatttatttcatcactcaggtattaaacctagtacctagaggtcatttttcctgatcctctccctccaccctccaaaaagccctagtgtgtgttgctcccctgtgtgtccatgtgttctcatcatttagctcccacttacaagtgagaacacgttgtatttggttttctgttcctgtgttagtttgctagggatgatagcctccagctcccgtcgtgtccctgcaaaggacatgatctcgttcttttttatgacagcctcatttaaggattagaaaagtaaaagaattaagccctataatggtcatctggctgaggaggggcagaaacaggagtccctgctccatgattccctgcctgggtgatcagacgcatgacttcacttcaccaagcctcagtttcctcatctctaaaattagggcaatcccttcttcctcttaaggctattaggaaaacaagaagattaaacaccaggaacacacttgacctacccccttcacgctccaggatgtggcattatctataagagatgcccctggtctggcccgacgcggtggctcacgcctgtaatcctagcactttgggaggccgaggcagatggatcacctgaggtcaggagtttgagaccagcctggccaatatggcgaaaccccatctctactaaaaatacaaaaaatgagccgggtgtggtggtgggcgcttgtaatcccagctactcgggaggctgaagcaggagaatctcttgatcctgggaggcagaggttgcagtgagctgagattgcactccagcctgggcaacaagagcaaaactctgcctcaaaacaacaacaacaacaacaacaaaaagatgcccctggtccttcagacctgcctctgtatctgacctctgccctcttggttccaggacccatcaccttcctgccctcaccttttccccagccacactggcttcctggctgttctttaaggcatatcgtatctcagggcatttgccccagctgttccctttaccagaaactttctacccaagagatcgccccatagctaagtctggttattcaggtctttgcttaaacatcacctcctcagagaggcctgaggcttcccaaaccaaagctgccctcaggcacacactcttcactcttttaccttcctactagtcggctgtcaccattggtattatcttgcctgtcagctgtcgccatctgatattaagggcccttttggggcctgcctcggcctcccaaataactgggattacaggcacgagccaccgcccccggcctgggacagggtcttgcacacggtatgcgctcagtaaagacttggtggtgatggccggacgtgatggctcacacctgtaatcccggcactttgggaggctgaggcaggtggatcacttgaagtaaggagtttgagaccagcctggccaacatggtggaaccccgtctctactaaaactacaaaaatttgccgggcgtggtggtgcacgcctgtaatcccagctacaccggaggctaaggcgggagaatcgcttgaaccggggaggcggaggttgcagtgagccaagatcttgcgactgcactccagcctgggcaacagagcgagactcttgtctccaaaaaacaaacaaacaaacaaacaaaacttgctgatgaatgactaaatggacgttattctgagtttgttttgcggccaggtgagcgtatacataaatctacaacatgcagatgctgcgacgtgaccccgaaggggtaggcacggtttggggcccagttcgcccacggggcacagagggcagccccgcgtctgcctgcacgcacgcacctctcccgacgcttctgctcttcggccagctgcttcacccgcagcgactcctgcatggtcgccaggctcgggtaccattcgcgttcttcggcctccagctcccgcagctgctccggcgacggccataacgaaccggggaccaccccggaggcggcgccgtaacgcgcgaactgcttagccgcgtagcgcggtcccagctgccaccgcggggtcaggaggtcctcggggtctggccaccggggtcccggcctgcggcgcgggggcggccgcgcccggtagccacgggaacccggggccagggtcgccgccacacctagtaggctgcgtgcctgtcgcacggacgccgccatcttggctgtgcggggtcctcacaggcccgccgggctgtccatgcccggtgcctgagcgcgaggcccggtgtgggccagggcagggcgaggggtgtccctgctgcctcagttcgggggagggcggcgaaggggatagtatgggttttatacgtttccaagtataactttaaattttagttaagcagttactgattaaagtcatttttaattttcactttttttcttctcctttctgcacactgacacttaaaaatacatatttttgtcgggcgcggtggctcacgcctgtaatctcagcactttgggaggccgaggcgggcggatcacctgaggtcgcgagttcgagaccagtcttttttttttttttttttcgagacagagtctcgctctgtcgcccaggctggagggtaacggcgtgatctcgggtcactgtaacctccgccttccgggaggagaggagaaaccccgtctctactaaaaatacaaaattagccgggcatggtggcgcatgcctgtagtcccagctccgcgggaggctgaggcaggagaatcgcttgaacccgggaggcggaggttggggtgggccgagatcgtgccattgcattccagcctgggtaacaagagcgaaactccgtctaaaaaattaataaataaaaataaatacatacatgcatacacacacacacacatatacatatatatatacgctcacctggctacaaatatatatttgtgtatttttttctaagtgttcagtgttctttgggtaaaaattgtatttttgttttttgcatatcagaaaccatactgttttattcatccatgtgtcttctgtgcacacagtagccctccaatgaataatctgaaatcatgttgaatgaacacattgaaaaatcaaaaataagaggctgtggcagggccactgatatggtttggctctgtgtccccaaccaaatctcatcctgaattataatccccatgtgtccagggagggacctgtaatccccacatgtcggggaagggaggtggttggatcacgggggtggtttcccccatgctattcttttttttttttttttgccttcaaaaagtttattttattttattttattattattatactttaagttttagggtacttgtgcacaacgtgcaggtttgttacatatgtatacatgtgccatgttggtgtgctgcacccattaactcgtcatttagcattaggtatatctcctaatgctatccctcccccctccccccaccccacaacagtccccggtgtgtgatgttccctttcctgtgtccatgtggtctcattgttcacttcccacctatgagtgagaacatgcggtgtttggttttttgtccttgcgatagtttgctgagaatgatggtttccagtttcatccatgtccctacaaaggacacgaactcatcattttttatggctgcgtaaaaattatatttttaactttacttttatacatttaaactagcatttattaggctgggcttggtggctcacgcctgtaatcccagtactttgggaggctgaagcgggcggatcacttgaggtcaggagttggagaccagcctgaccaacatggcaaaaccttgtctctactaaaaatacaaaaattacctgggcgtggtggtgggcgcctgtaatcccaactactcaggaggctgaggcaggagaatcgcttgaacctgggaggtggaggttgcaatgagctgagatcgtgccattgcactctacccagggtgacagagtgagactctgtctgaacaaacaaacagacaaaaagcccactagcatttattatttttttaatgtaaatgtggctgaacgcggtggttcacacctgtaatcccagcactttgggaggctgaggcaggtatcactgaggtcaggagttcgagaccagcctggccaacatggtgaaaccccgtctttactaaaaatacaaaaattggctgggtgcggtggtgcacacctgtaatcccaactactcgagaagctaaggcaggagaatcgcttgaacccgggaggcggaggttgcagtgagctgagattacaccactgctctccagcctgggcaacagatcgagactctgtctcaaaataaataaataaataaataaataattctgtcacatgctgtgacatggatgaaccttgaggacattaggctaagtgaaagaagccagtcacaaaaggacaaatattgtatgattccacttatatgaggtaactagagtagtcaaattcatagagacagaaagtagattaggagttccaggggttgggggtggaggagtgggagttattgcttataatgtataatatattttatattgtaaaatatacaaaataaataaaacgaatttgtgttttgttttgttttgagtcagagtctcgctctgtctcccaggtgagagtacagtgatgcaatcttggctcactgcaacctctgcctcccagattcaagggattttcgagcctctgcctcctaagtagctgggaccacaggcgcaagccaccaagcctggctgattttcatattttactagagacggggtttcaccacgttggtaaggctggtctcaaactcctgaccttaagtgatctgcccacttcagcctcccaaagtgctaggattacaggtgtgagccaccatgactggccacgttttttttgtttttttttttttgtttgtttgtttttgagatggagtttagctctgttgcccaggctggagtgcagtggtgcgatctccgctcactgcaagctccgcctccggggttcacgccattctcctgcctcagcctcccgagtagctgggactacaggcgcccgccaccacgcccggctaatttttttgcatttttagtagagagggggtttcaccgtgttagccaggatggtctcgatcgcctgaccttgtgatccacccgcctcggcctcccaaagtgctgggattacaggcatgagccaccgcgcctggcctgttgtttttgtttttaatcacacacgcacaccttctctacccccgcaaaaaataactgcagttttctcaagacatgaatgttcatagcaacaccacatatatatgtcattaccaagctggaaatagctcacacccaatgtccatctgaagtagaatggacacctaaattatgctgtttcagccaatggaatactacacaggaatgaaagagcaaatattacatcttctcacagaagatggatgatgcttataagcataatgtgcaacaaaggaagaggacctatatgattgctttttaaattttatttttttgagacagggtattgctctgttgcccaggctagagtgccctggctcggtcatagctcactgcagccttgaattcctgggctcaagcaatcctcccgcctcagtctcttcagtagcaagactataggcatgaaccgctactcccacctacattttaaatttttttgtagagacggggtttctctatgttacccaggttggtcttgaactcctggctcacctcccctcccctcccctcctttcttgacagggtctcactgttgcccaggctggagtacactggcatatcactgcagcctcaatctcctggtctcaagtggtcctcccacctcgggctcctaagtagctggaacttcaggcactcaccatcaagcctggctaatttttgtattatttgtagagatagagtctcaatatgttgcccagggtggtcctgaattctgggacccaagttatcctcccaccttggcctcccaaaatgttggaattacaggtatgagctaccatgcctgacctcagaattttttcatcttgcaaacctgtaactctatacactcactccccagtttccctttcgcccagtccctggcagtcactattccttttttttttttttttttgagacggatggagtctcgctccgttgcccaggctggagtgcagtggcgcgatctcggctcactgcaagctccgcctcccgggttcacgccattctcctgcctcagcctcccgagtagctgggactccaggcacccgccaccacacccggctaatttgtttgtatttttggtagagacagggtttcaccgtgttagccaggatggtctcgatcccctgacctcgcgatctgcccgtctcggcctcccaaagtgctgggattacaggcgtgagccaccgcgcccggcctggcagtcactattctaccttgtttctatgaatttgactactctaggtacctcatataagtcgaatcatacggtacttgtccttttgtaactggcttattttttattttgagacagagtcttgctctgttgtccaggctgaagtgcagtggcacaattattataactggctgcagaatcgacctcctggactcaagtgatactcccacctcagcctctcaagtagctgaaactacaggtgctcacctggctaattttttttttttttttttttttgagacagggtttcgctctgtcgcccaagctagagtgcaggggcgccatctcggctcactacaagctccgccgcccgggttcacgccattcttctgcctcagcctcccgagtagctgggactacaggcgcccgccaccacgcccggctaattttttgtatttttagtagagacggggtttcaccatgttagccaggttggtctcgatctcctgacctcgtgatcctcctgcctcggcctcccaaagtgctgggattacaggcgtgagccaccacacctggcctttttttttttttttttgagacagagtacttactctgttgcccaggctggagcgcagtggcatgatctcggctcactgcaacctctgcctcccaggctcaagcaattctcatgcctcagccacctgagtagctgggactacaggtgtaaaccactgcacctggggctggctgattttaattagtataatatcctaaaatttctttctttctttctttctttctttctttctttctttctttctgtctgtctgtctgtctgtctttctttctgtctgtctttctttctttctttctgtctttctttctttctttctctttctttctttccttctcttctcttctctccttccttccttcctttctttctttccttccttcctttctctttctttcgacattctctctctatcgcccaggctggagtgcagtggcactgtcttggatcactgcaacccccacctccccggttcaagcaattcttgtgcctcagcctcccgagtagctgggattacaggtgcccgccaccacacctggctaatttttgtatttttcgaggtttcaccatgttggccaggctgatctcaaactcctgacctcaagtgatctgcccacctcagcctcccaaagtgctgggattacaggtgtgagccaccgtgcttggcatatcctaaagtttcatccatgttgtagcacgtgtccgaatttctttttttcttttttttgtatttttagtagagacggggtttccccgcattagccaggatggtctcaatctcctgacctcatgatccgcccgcctcagcctcccaaagtgctgggattacaggcttgagccaccgcacccggccaacgtgtcagtatttctttcctagcctgggcaacactgtgaaaccctgtctctccaaaaaatacaaaaattagctggctatggtggtgcatccctgtagtccctcctacttgggaggctgaggtgggaggtcaattgagcctgggcggtgaagtctgcagtgagctgtgagtatgtcagtgcactccagactgggtgacagagcgagactgtctcaaaaaaaattttttttttcctttttaaggctgaatgctattccattgtatgaatggaccacattttttttttcccaattgcagatgtcaggctgaaagaatggaccacattttaggctgggcacgatggctcatgcctgtaatcccagcactttgggaggccgaggcaggcggattacaaggtcaggagttcgagaacagcctgtggtgaaacgctgtctctactaaaaagacaaaaattagccgagcgtggtggtgcgtgcctgtaatcccagctactcaggaggctgaggcaggagaatcgcctgaacccaggaggtggaggttgcagtgagccaagatagcgccactgcactctagcctgtgtgacagagtgagacttcgtctcgaaaaaaaagaaaaaaaaagcggccaggcacggtggctcacgcctgtaatcccagcactttgggaggccgagacaggcagatcatgaggtcaggagatcgagatcatcctggctaacatggcgaaaccccgtctccactaaaaatacaaaaaattagccgggcgtggtggcaggcacctgtagtcccagctactcgggaggctgagacaggagaatggcgtgaacctgggaggcggagcttgcagtgagccgagattgcaccactgcactccagcctgggcaactgagcgagactccgtctccaaaagaaaaaaaaaaaagaatggtctacattttgtttatccatttatctgtacgtggacatttgagctgtctccaatttttgcctattgtgaataatgatcttatgaacatgggtgtacagcatttcttcttcttcttctccttcttctccttctccttcttcttctctttctccttctccttcttgttcttctccttcttcttctttcttctttcttcttctttttatgagacagaatcttactgtgtcatccaggctggagtgcagtggcacgatcttggctcacagcaacctctgctaggttcaagcgattctcttgcctcagcttcccaagtaactgggagtacgaccgggcacagtggctcacgcctgtaaccccagcactttgggaggccaaggtgggtggatcacctgagatcaggagtgtgcaccaccacgccgagctaatttttttttgtatttttagtagagatgagatttcgccatgttggccaggctggtctcaaactcctggcctcaagtgatctgcccacctccacctcccgaagtgctgaggcttttattctttttttccccgctgagacagagtcttgctctgtcatccaggctggagtgtagtggtgcaatctcaagtcactgcaacctctgcctcccaggttgaagcaattctcctgcctcagcctccggagtaactgggattacaggcacacgccaccacgcccagataatttttgtattgttagtagagacagggtttcaccatgttggccaggctggtcttgaactcttgacctggtgatccacctgcattggcctcctagagtgctaggattacaggcgtgagccactgtgaccagcctggtttttattcctttttttttgtttgtttgttttttgagatggagtctcgctctgtcacccagactggagtgcagtggtgcaatctcagctcactgcaagctctgcctccctggttcacgccattcttctgcctcagcctcccaagtagctgggactacaggtgcccaccaccacacctggctaatttttttttttttttttagtagagacggggtttcaccgtgttagccaggatggtctcgttctcctgacttcgtgatccacccaccttggcctcccaaagtgctgggattacaggcgtgagccactgtgcccatcctcaggtgtttattcttagtgaaataaagtagcatagaatcaaattaccagattgtttctagtaattactgtcacactgtgggcctcctcctgaggcttttttctgagggagatgagagccatggaaggttctcatcacagggaccagtcttgactcaggtgctcacaggcgccctctggccgctgtggggggaataaactgtggggggccggtggccagggcgggaactgggagacctggaaggaagcgactgcactgatccaggtagggggacaaggagtgggtgagaagcgggcggattctgggtagattctggagctgaccggagttactgtcatataagattgggggcggggatgggtgttagagaaagagataggtcaaaggtgctctccaaagtttggagccttagcacctggcaggacagagctgcctttaactgtgtctagaggacagcagaagggcaggttgggggacagtcaggagctgggatgtagcagagctgggtgggaagcacgcccgcccctccaggcttggcctctgggaggcgggtgtcctgggcgcggccgccgcacagtcccgggagccgccgccagagggcgagcacgccgcatcgcactcgcagctccgtggaggggagggcgcgggaaaggctggcctggtctcttcccacggccccccggcctccaagctcctcacctgggtgcgagatagaggtgccaggatccagccaggaccccccagacacctccggggccccaaagcctgggatacgactctcaccctctttatctgcttctaacactcccaacctccacccccacaccaagctgttcccaccgcctccagcgccatctcaggtgtctgtaaaaatgccacctactcggggaggccttccctgaccaccctggagacagaagcccccgccctgacgcctctaaggaacatcccattttagcagcttcttaatcaagactgtgaaatgatctttattattattattattaatatttttgagaaggtctcactctgtcactcaggctggagtgcagtggtgtgatctggctcactgcaaccttcgcctcccgagttcaagcaattcttctgcctcagcctccagaggtagctggggttacaggctcatgccaccacgcccggctaatttttttttttgagacgcagttttactcttgtccaggctggagttcaatggtgtgatctcggctcatcgcaacctccgcctcccgggttcaagcgattctcctgcctcagcctcccgagtagctgggattataggcatgtgccaccatgcctggctaattttgtatttttagtacggacggggtttctccatgttggtcagactggtctcgaactcctgacctcagttgatccacccgcctcagcctcccaaagtgctgggattacaggtgtgagccaccacgcccagccttgcccggctaatttttgtattttttagtagagatggggtttcgctatattgtccaggcctcaagttatctgccctcctcggcctcccaaagtgctcggattacaggcatgagccactgcgtgcggccccttaattatcttttattgtctgttttctgcaccgtgtaaaatccatggcattttctgtcttgtcctcctgtatcaccagggctcaggattaagtctggcctatactgagtgttaaaggaaaaaaaaaaaaaaaacagctgggcaaggtggcatgtgcctttaatcccagcactttgggaggctgaggcaggaggatcacttgaagccagcagtttgagacaaacctggtaacatagtaagatcccgtctctgtgaaaatttaaaaatcagccaggccgggtgcggtggctcacgcctgtaatcccagcactttgggaggctgaggcgggcagatcatgaggtcaggagatcaagaccatcctggctaacacggtgaaaccccatctctactaaaaatacaaaaaattagccgggtgtggtggtgggcgcctgtagtcccagctactcgggaggctgaggcaggagaatggtgtgaacccgggaggcagagcttgcagtgagccaagatcgctccactgcactccagcctgggcgacagagcgagtctccgtctcagaaaaaaaaaaaaaaaaaaaaaaatcagccaggcatggtgttgtgtacctgtagtctcagctattcggtgggtttgaaacaggaggattccttgagtctaggaggttgaggctgcagtgagatgcaattgtgggactgcatgccaacctgggtgacagaacaagaccctgttaaaaaaaaaaaaaagccaggtgcggtggcttacacctgtaactccagcactttgggaggccaagacgggcagactgcctgacctcaggagttcaagactaccctgggcaacatggggaaactccatttctactaaaaaaaaaaaaaaaaaaaaattagccaggcatggtggcaggggcctgtagtcccaactactcgggaggctgaggcaggagaattgcttgaacccagaaggcggaggttgcagtaagctgagatcacaccactgcactccagcctgggggtgacagagggagactgtctcaaagaaaaaaaaaagaagaagagaaaaacaagtcaggcaagatagcttcctgtgcctatattcccagcattttgagacctgcttttcaagaccagcctgggcaacatagtaagaccctgtgtcaaataaaaaaataataaaataaaaagaactggcagggcatggtggctcatgcctgtaatcccagcactttgggaggctgaggtgggcggatcgcttgaagtcaggagttcgagaccagcctggccaacatagtctctactacaaatacaaacattagctgggcatagttgttcacatctgtaatcccagctacttggggggctgaggcaggagaatcacttgaccccaggaggcagaggttgcagtgagacgagacacagtgagactctgtctaaaaaaaaaaaaaaaaaaaaaagaacacaaaaacccagcaacaataatgttactcagagctgattcatggtgttactgtgtaggaacctctgttttaagctccttacataaattacctccttgagtcctcagaataacccaatgagatagggactgttttatcttcatattacagaagaagaaggtagggaccaggatggttaagggatttactcaaggttgcacagccaggaaattgcaatgcctaggccgaacccaagaaacctggctgcaaggtatgctagtttttaattttttttgagacagagtctcactctgttgcccagtctggagtgcagtggcgcgatcttggctcactacaacctccgcctcccgggttcaagcgattctcctgcctcagcctcctgagtagctgggattacaggcatgtgacaccacgcctggctactttttgtatttttagtagagacggggtttcacttatgttggccaggctggtcttgaactcctgacctcaggtgatctgcccgcctgagcctgccaaagtgctaggattacaggtgtgagccaccgtgcctggccataatttttgtatttttattttatttattttttaattttttttgagacagagtctcactcttgtcgtccaggctggagtgcagtggcgcgatcttggctcactgcaagctccgcctcctgggttcaagcgattctcctgcctcagcctcctgagtagctgggattacaggtgcccaccaccacgttcagctaattttttttgtatttttagtagagacggggtttcaccatgttggtcaggctggtctcaaactcctgacctcgtgatctgcccgcttcggcctcccaaagtgctgggattacaggcgtgagccacctcaactggcgaattttttttttttttttgagacggagtctcggtctattgcccaggttggagtgcagtggcgtgatctccgctcactgcaagctccgccttctgggttcaggccattctcctgcctcagcctcccgagtagctgggactacgggcgcccaccaccacgcccggctaattttttgtatgtttagtagagatggggtttcaccatgttagccaggatggtctcaatctccggacctcgtgatctgcccacctcagcctcccaaagtgctgggattacaggcgtgagccaccgtgcctggccaatttttgtatttttaaagtagagatgaggtctcaccatgttgaccaggctggtcttgaattcctgacgtcaggtgatcctcccgtctcggcctcccaaagtgctgggattacaggtgtgagccactgagcctcacccaaagtgtgcttttgctaattggagaatcggggtcccaggactggaaatgcagctgcccagggtcttcagacattgtgtgtctcggcccctggccccagacctgtctttcctggtccccacagctcgcacacagcaggaccagcccccatgtctctcagcaagttgggaggaggtgtgggaacccagctggtctgaatttactctcctcccccgctgtgggtctacagaaatgcctcccaggctatccaggaggggccaagagattaaaagcaggttcagaaggctcagatgccactcaccagacagcagggtcgactgctagtgaccttgagcccagtccggacagacagacaggcagacagacgcacggacaagcagatgctccttggccagctatccactcttctgtgcctgcttagcggggccctgcctacaggctcagggaggcctgaaccccagtctcctcgacctcagtcctgggctgcagccaatcagacctgggctctgggcccaggggccctgcccccactggtgccagcttctgcccttgggagctggaaggccttcttgggcctgcagaaagccaggcagctggggatgggcaggctgcagcgtgggcaagacgaggtggctgctgtgactctgccgctgaaccctcaggaagtgatccaggggatgtgtaaggctgtgcccttcgttcaggtgagtgggtgggtgtggggaggagagggctgggtctcaccattggcagaaggcacaggctgtggcccaagaaagatttgggttcaagtcctgtatcctccacctgaatgtctcggtgcctcagtttcctcccttgtaaaatgcgacccaagcctcctctatcctggtctccttgattccactatcatgcccctctccaccccccagtctatttttccactcagcagccagagggtgcctgtgaacaccagagtcagatctggttccccctccccctagaaccttgcatggctcccactttactcagaacaaaagcccaagtcctcttcacagcccacaaatttctgtactctctgatcctgttacctccctgatttcacctcctcccactctccccctcagttactttgcttctacacatcagcctccttttcctcagacaccaactttctttctgtttttttagacacgggagtctcgctatgttgcccaagctagtcttgagcttctggcctcaagcaatcctcccacctcagcctcctgagttctaggtgtgagcccgtctcttgcttgatataccaactttctttcttttctttctttctttctttttctctttctttctttcttttctttctttgtttttctttttttctctttctttctttctttctttcctttctttctttcttttctctctctctctttctttttttgagacagtctcactctgtcacccagactagagggcagcagtacaatctcggctcactgcaacctccacttcctgggctcaagtgattctcgtgcctcagcctcccaagtaattgagattacagatgtgcactaccatgtccggctaaattttgtactttttgtagagacgtggtttggccatgttggccaggctggtctcgaactcctgacctcaggtgacccgcctgcctcggccccccaagtgctgggattacaggcgtgagccactgcgccaggccaatgagaagtctcttatgaggaagatggctcaggatttaagcagagaaggaccaggatttgggggagagatgatagatccacttggaggggatcataggaggaactaacatgcattgagcacctactttgtgccaggcagtgggctaagggctttctgttggatgcttccgggctcctgtgatactgctgtcccttccccctagggtgctagttggcttcctactggtaccatcatcaggccatcttatcatcatatcctgcttggcttttctttacttttcttttcttattatttattttattttattttatttttgagatagagtctcgctctgctgcccaggctgcagtgcaatggcgcgatctcagctcactgcaacctccgcctcccgggttcaagcgattctcctgccttagccttccgagtagctggttttacaagcacacgccaccatgcccagctaatttttgtatttttagtagagacgggctttcaccatgttggtcaggctggtctcaaactcctgacctcatgatccacctgcctcggcctccccaagtgctgagattacaggcatgagccactgcacccggccttctttacttttcttttcaggtttttgttttttgagacagagtctcactctgtcgcctaggctggagtacagtggtgcaatctcggctcactgcacctccatctcccgggttcaagcaattctcctgcctcagcctcccgagtagctgggaccacgggcgcctgccaccatgctcagctaatttctgtatttttagtagaggcggggtttcactatgttggccaggatggtcttgaattcctgacctcaaatgatccacccacctcagcctcccaaagtgccaggattacaggcgtgagccaccacacccggccttttcatgttttttgttagagacagggtcttactctgtcacccaggctggagtacagtggtgcgatcatagctcactgcagatttgaattcctaggatcaagcaatcctcctgcctcagccttctgagtagctaggcctacagacgcacagcattagcccagctaatattttttttttttttttttgagacggagtctcgctctgtcgcccaggctggagtgcggtggtgggatctcggctcactgcaagctccgcctcctgggttcacgccactctcctgcctcagcctcccaagtagctgggaccacaggcgcccaccaccacgcctggctaatttttttgtatttttagtagagacggggtttcaccatattagccaggatggtctcgatctcctgacttcgtgatctgcctgcgttggcctcccaaagtgctgggattataggcatgagccaccgtgcctggctagctcagctaattttttttttttaatttctttgtagagacagggtcttactatattgcccaggctggtctcaagccaccacatcccgcccttggcttttaactccgaggtaaccaattccctgaattagtcctctttgttgaaaggcctaaagtgatttcttctttttctcatttaattaatttatttgtttatttatttcggagacagagtctcgctctgttacccaggctagagtgcaatcatgatctcaacttgctgcaaccttcacctcccaggttcaagcaattcttccacctcagcctcccatgtaactgggattacaggtgtaggtgcccatgcccggctaagttttgtattttcagtagagatggggtttcgccatattggccaagctggtctcaaactcctggcctgaagtgatccgcccacctcagcctcccaaaatgctgggattacaggcttgagccaccacacctggctgtctttgttgaatttcttttcttttttttttttttttttttgagacggagtctcgctctgtccccaggctggagtgcagtggcgctatctcggctcactacaagctccgcctcctgggttcacaccattcttctgcctcagtctcccgagtagctgggactacaggcgcccaccaccacgcccggctcattttttgtatttttagtagagacggggtttcaccgtgttggccaggatggtctcgatctgctgacctcgtgatccgcccgccttggcctcccaaagtgctgggattacaggcgtgagccaccgcgcccggcccttgttgaatttcaatgattttccaggtgaggaaacaaaagctcagagaggctaagtaatttgccccatgtctcagccaagagacagcagagtcaggatttgaacccaggcagcctggctgcagcatccatgcctgtcaaggtggggtggaagtggacaggtgattatcctcgccactctggccccaaactccgccaccctgaccgtctccatgcctccggccccaggtgttctcccggcccggctgctcagccatacgcctccgaaatcatctgtgctttggtcattgctcctctctctacatccctggctcggaccccaccccactagtcctgtgcaacagctgtatgcctgctcgcaagcgttgggcacccgtggtcctgtggtgtctcactggcagctcagcctcccgtcgacgggtgaagatatccaccatgctgatcgaggggtgtcactgcagcccaaaagcatgaactgagcatcgtggatgggtgcacggagacacgcaccttggagaaatgaggggagatggaccaagaaagacgtggacctggatgatgtactctgggtcaagagaccagggatgcagggttaggcagacaggtccccagagtcctcaccctgctccccagacagtagacacagtgcccgtcctggagttgcaccactgatagtcacagcacacaatgattgacaactcactttttttttttttttttgagatggagtctcgctctgtcgcccaggctggagtgcagtggcgcaatctcagctcactgcaagctccacctcccgggtttatgccattctcctgtctcagcctcccgagtagctgggactacaggcacccgccaacacgcccggctaattttttgtatttttagtaaagacagggtttcaccgtgttagccaggatggtctctatctcctgacctcgtgatctgcctgccttggccttattattttttttttttaaggacagagtctctctctgtcacccaggctggagtgcaatggcgcgatcttggctcactgtaacttccacttgccaggctcaagcagttctcctgcctcagcctcctgagtagctgggactacaggcacccgccaccatgcccagctaatttttgtatttttagtagagacagagtttcaccatattagcctggctggtctcaaactcctggcctcaggtgatctgcccacctcggcctcccaaagtgctgggatcaaatccactgttaatcattaggctgaactgtctcttatagaatgaggtcaaagacactcccagttgcagggagggtagatggccccacccagaccgagagacacagtgatgacctcagcctagggacaccaaaaaagaaaaaaaaaaaaacccaaaccaaaaacgcaaaccaaagcaggcaggcagacagctgctgggggaaatcctggggtccttgagacagaggcaggaccctcgtgttcccagctgcctcttgccttgatagtggtgctgtgtccctctcagaccccccacctgagtctccacagagccccacgcctggcatggcattccacagaaaccataaaggttggctgagtccagctgtctatatgtgcatctgtttgttcctccaactggggttccctgggagtgggtggccccatgacagggtgtgggcatctgagtgctccctccccagctggggctcagggtcttcagcgggcgagggcggcctggctttgggcggctggaaccagggccctggcagatgggcctgtctggcacagacgcagggacatgtggcgttgtcagtgttgcctccaaatgccccccggagcgtggggcggggagccggccaggcccttctcagccctcttcctgcctcaggaaggaaggcctcaggtgaggggagcaggaggggacccgaggaaacagatgggccagtggggcgtgggagcctgagacccctgacctcacaggcctcacagagagatgggaacgggacaggcaggcagctcccaaggccccttgctcgaagggccctggaggggagggtcatgaagggctctgggggggctgccccatccctgttccctccagagttctgtgccaaaccccaggcagtgtccgagtgggcagctcagccctggcaccatgggcaagcccccctctggtgggcatgaggcatttgccttccctccctctgctgtgcccacctcctgccagccaggggagccagctgggaaccttggtgccaggggagcccccagagtccctgtcccctcccgggcagtgccagccggcccctgccccgcccccccaggcccagtaatgggtgggtaatgagtgctgggggagcgggggaggggcaggggatgcaggtgccacaggcgctggcacgggggccgctaatcaggtttgccaacgccatctgtcaccgcacgagcatctggggctcaaggtgaccctgtcaccctcagttacaattatgagtttggcatctgtattaaagcccgccagccggccaggcgggggacggctggggtgggcacggggttgcacggtgaaccccatccctggggtacccttcccaggggctgcgtggctgccaggcgtggagcttcttaggggactatgtctgtgtgtgtatgtgtgtgtgtgtgcacacccatcccagtctccacaattcttaaagtgtgtccgggtgcagggctggaaatcataggtttgtgtgtgtctccatggtggctgtgtgtctaggagtttggtgggctggctgggggcggagctctgagattttgtgggtgcacagatgttcgtgcatctgcatgctgggacaagaacgtatggaggagggtgtctctttggatgatggtgtgtctttttcttttattagtagtattaattattattcttatttgagtcagggtctcgccctgtcacccaggctggagtgatcatggcccgatccctgcagcctcaaactcctgggctcaagtgatcctccctcctcagcctcccgagtagctggggctacaggctcatgacaccacgcccagctaattttgtttatttttttgtagagacagggtctcactgtgttgcccaggctggtctcgaactcctgggctcaagccatccttctggtttggccttccaaagtgctgggattataggcgtgagccaccacacccaacctgatggggtgtgtgtgtgtgtgtgtgtgtgtgtgtaaatgcacaggggtaggttgggaggggtatcagctttgggagaggccatgtgcagtactgctgagctcctcagctatccctttgtttctatcttcgccaactcctgctacgtggctgtgatctggagggctctgaggacggcttaagaatctggattttggctgggtgaggagtctcacgcctgtaatcccagcactttgggaggccaaggcaggtggattcattgagctcacaagttcgcaaccagcctggccaaaatggcagaactatgtctccacaaaaatatattaaaaattagctgggcgccgggcgtggtgactcatgcctgtaatctcagtactttgggaggctgaggcgggtggatgacctgagatcaggtgttcaagaccagcctggccaacatggcgaaaccccgtctctactaaaaatataaaaattagccaggcgtggtggcgcgtgcctgtaatcccagctacttgggaggctgagacaggagaatcgcttgaacccaggaggcggaggttgcagtgagccaagatggcgacactgcactccaggctgggcgacaaagcaagactccatctcaaaaaaaaaaaaaaaaaaaattagctgggcatggtggtgtgtacctggaaccccagctactcaggaggctgaggtgggagaatggcttgagcctgggaggcagaggttgcagtgagccaaggttgtgccactgctttccagcctgggtgatagagccagaccttgtctcaaaaaaaaaaaaaaaaaagaaagaaagctctcaattttgtaaggtagcctttggattctaaattcttggagctagattctgggtctggtggattctagttttgagcaataggatctagatttttggaatctgaatcccggagtatggtttcagtggcaccatcatagttcactgcaacctcagacatgtgccactacacccagctaatttttaagttttttgtagagataaagtcttgctatgttgcctatcgtgtcccaaactcctggcatcaagtgatcctcacgccttggcctcccaaaatgctgagattatagctgtgagccaccacgcctggctgagttcgtggatctggagtatagatcttggtatgattggaatcttttttttttttttttgagatggagtctcactctgttgcccaggctggagggcagtggcgcaatctcagctcactgcaagctccgcctcccaggttcaagcgattctcctgcctcagcctcctgagtagctgggattacaggtgcccactaccacacccagctaatttttatatttttagtagagacggggtttcgccatgttggtcaggctggtctcgaacccctgacctcaagtgatctgcctgccttggcctcccaaagtgctgggattacaggcatgagccaccgtgcccagcccggtatgattggactctagatgctgatcctgggtcctgggatctggattaccggctcttagttctgtatctgcgttcctgcttctggacttcagtctctgggcctgtgtgctctgtgtcctctctgtccacagctccaagttcagcaactgggcggctgcctgtcgtccctccatggatgggtgcagagaccacctatggccaccaggggacacccttggtctacatttggtccaagctgcccgactggaggaggagtctgggaccactgtggcccagttggactcagccctttcaggaggaccaggggctggacatcactttcccccacttccatcccagtctctgctgggacctgaaatctgtcagcccccactgactcaaacgtggagaactggactgagcacccccacagtgttctgaacagtaccgtgggacaaggtgcctgcccagtgagtaggtcagacccagggttgaagccatgtgtgtccatgagggtgacaatgagtgtctgaaaacgtgtccaggtgtgaaggcgagggtgcaccattcatcaggagtggccacatatgacagcattgctaagaagtgtgagcctgggaggcgcggtggctcaggcctgttgtcctggcgcataagaaagtgaggcccaaggccgggcgggcggatcacgaagtcaggagttcgagaccagcctgaccaacatagtgaaaccccgtctctactaaaaatacaaaaattagcctgtcgtggtggcgcgtgcctgtaatcccagctacttgggaggctgaggtatgagaattgcttgaacccagaaggcgaaggttgcagtgagctgagatagtgccactgcactccagcctgggcaacaagagcaagactccgtctcaaaaaaaaaaaaaaaaaaaaaaaagtgaggccaggcgttcaagccctcatctatgtaacaaaacaacaacaacgacaacaaaaatgtgaacctgtgtgttggatggtgtgtggccaccactcactgtattcacatgtctgataaggtcctcatgagacagtgcacctacacggttgtgtctataactgggagatgtcaccaggagcccttgtatgagtccgtgtccatgtcatattcatgtgtctgcgtctatgattgtgtcactaggaatctataggtatccataggtatgactgggaccatctaggggaagtgtcactgggtgacggtgtcctggagtgtcagaaacagtgtcctggctgggtgcaggacctgtaatcccagcactttgggaggctgaggcgggcagatcacctaggtcaggagttcaagaccagcctggccaacatggtgtaacagtgtctctactaaaaatacaaaaattagccaggcatggtggtgtgtgcctataatcccagctactagggaggctgaggtgggagaatcgcttgaacctgggaggcagaggttgtagtgagctgagatcatgcgccattgcactccagcctgggtgacagagcgagactctgtctcaaaaaaaaaaaaaaaaagaagcagtgtcccagcactttgggaggccaaggtgggaggatcatttgagcctaggagttcaagaccagcctgggcaacatagcaagaccctgtctctacaaaaaatttaaaaaattagcggaacatggtggcatgcacctgtagtctcagctactcaggaggctgaggtgggaggatcacttgagcccaggagttcaaggctgcagtgagctatgattgtgccactgcactccaggctgggtaccagagcaagactttgtttcaaaaataaataaatatggctggacatagtggctcatgcctgtaattccagcactttgggaggctgagatgggcagatcacctgaggtcaggagttcgagaccagcctggccaacatggcgaaatctggtctctaccaaaaatacaaaaatcagccagatgtggtggcatgtgcctgtaatcccagctactcgggaggctgaggcaggagaatgatggaacccaggagacagaggttgcagtgagctgagatcgcaccactgcactccagcttgggcgacagagtgagactccatctcaaaataaataaataaataaaataaagaagcagtgttcctgaaggctgagcctctgtgtcaacagtgtcttatcaggggctgtgtgaaggtgtgtaggacagagggtatgctttctgagagtaccaaaccagggtgagtggaaggggcaggtgggaccagagactctcagagcagggagctggggttgtttccaagtttctctccttcattccctcacatctgggtatatctcaccctccatcttgctatgtctttttttttttcccttgggacagggtgtggctctgtcacccaggctagagtgcagtggtgcgatcatgtctcactgcagcctcaaactcctgggctcaagtgatcctcccaccttagccgtagctgggactacaggtgcaggacaccacgcttggctaattaaaaaaatttcttttttctttttctttttctttttttcttttcttttttttttgagacagtgtctcactcttgttgcgctggctggagtgcaatggtgcaatctcggctcactacaacctccgactcccaggttcaagcgattctcctgcctcagccttccaagtagctgggattacaggcgcatgccaccacacctggctaattttttgtagttttagtagatacggcgtttcgccatgttggccaggctggtcttgaactcctgacctcaggtgatccactcgccttgacctcccaaagtgctgggattacaggcgtgagccatcgcgcccagcccttaacatgttttttgtagagatgaggtcttaccatgttgtccaggctggtctcaaactcctaggctcaagcattccacacaccttggcctttcagagtgctgggattacaggtgtgagccatcacacccggccgctatgtctttctatggctgtgtgtcctctgacctctcagcacttctgactttgtctggctatccccattcccctgatttttttttattttttatttttatttatttattttttttgagacagggtctcactctgtcgcccaggctggagtgcgatggtgtgatctcggctcactgcaacttctgcctcccaggctcaagagattctcctgcctcagcctcccgagtagctgggattacaggcgtccaccactactgcccggctaatttttctatttttagtagagacaggttttcaccatgttggccaggctactcttgaactcctgacctcaaatgatccacccgcctcggcctcccaaagtgctgggataacaggcgtcagccaccgcacccaaccccccatcccctgatttttcccattgctaagcacagcacaccaggcaaggagggtccaggggtattggctgactggtcctgtcccgtctctcaccccaacccttcctctcccatcttgctcccgggctctgcctctccgtggtcttctccctccacccgtccttcctcattggtgtgtttctctccaccttccaggtctctcccgttgtttctccctcttggattccccatgtctttccctatctctgtctctgtctttgtctctcttctgtctctttccccacctttttttttgtgagacggagtctcgctctgttgcccaggctggagtgcagtggtgtgatctcggctcactgcaagctctacctcccaggttcacgccattctcctgcctcagcctcccgagtagctgggactacaggtgcccttcaccacgcccagctaatttttttgtatttttagtagagacggggtttcaccatgttagccagcatggtctcgatctcctgacctcgtgatccgcccgtcttggcctgccaaagtgctgggattacagtcatgagacaccgcgcccggcctcctttttttttttttttttttttttttgagacacagtctcgctctgttgcccaggctggagtgcagtggcgtgatcttggctcactgcaacctccaccttccaggttcaagtgattctcctgcctcagcctcacaagtagctgggattacaagcatgcaccaccacacccatctaatttttgtatttttagtagagacggggtttcaccatgttggccaagctggtcttgaacccctgacctcgtgatctgcctgcctcagcctcccgaagtgttgggattacaggcatgagccactgtgccctgccttctttccccttttgtgtctcatttctcccactccatctcctcttgtccattcttcccagccctaaatcttctcctatttatgtctcttttcatctctctccttttctcctaatttttccctgtccctctcatctccctatctctcctccttttttctcttgtttatttatgtatttattttgagacagagtctcgctctgtcacccaggctggagtgcagtggcgtcatctctgctcactgcagcctccacctcccacattcaagcaattctcgtgccccagcctccggagtagctggaattacaggcacgtaccaccacacccggctactttttgtatttttagtagagacgggggtttctccatgttggccaggctggtctcgaactcctgacctcaaatgatccgcccacttcggcctcccaaagtgctaggattacaggtgtgaacccccatgctcggcctcctctctccctttatctctgtctcttcccgttttttttctctcccagtgtctccttatctgcctctccctgcctagtctcccgtctctctccatctctcagtctccgcatctcttctctcatcatgtctctcccatcttttttcccctcatttctctgtctctcagtctctccagcttttcctgtgtctctgtctctccccatctctgtctctccatacccagtccccatgtctctccatctccatgtctccccatctcttctctctccccatctctctcatctctttctttctttctctttttctttctctctctctctctctctctctctctctctcgctttctttcctctctttctctgtctctctctctctctctcctttctttctttctgacggagtctcactctgtcgccaggctggagtgtagtggggagatcttggctcagtgcaacctctgcctcccgggttcaagcgattctcctgcttcagcctcccgaatagctgggactacaggcgcgcaccaccatgcccggctaattttttgtattttagtagagacaggatttcatcatgttgggctggatagtctcgatctcctgacctcgtgatcggcccgcctcggcctcctaaagtgctgggattacactgcgctcggcctctcatctgtttctttccccatccttctgtctctcaatctctccagctttctccggccctcccagtgtcttcatctctccccatttctgtctctccccaccaggtctccctatctcttcccatctctctccgcatctctgggtctcccatctctggtctctccctgtctctcttttttctctccccatttctctgtctctccccatctccgtctctctcatctctggtctctctcatctctggtctctccctgtctctcctgtctttttccctccccatttctctgtctctccccatcccggtctccccgtctctgtcggcccgggtgggtccgggtgggtccgggacggcccggcccgggcgccgcggcgaacaatgccccattcacgcgggccgccggcgccatggcaacgcgcccgccccgccctccctgcgcgcgggccgcgcgtgccaagaggatgccatggttacgtcaggcgcgtgcccgtcgcgcgcgccgccgtcccgcgcgctcttgcagggaggggccaggccagcagggggcgcgcggcagtagcctctgcccggagtcagaaggggcggtcttccccacttcaaggggccttcagctgcttagtgcctcagtttccccatctgtaaaacgggggcgatgggcaaagctagatcggagtgtgaaagagacagaaggaggaagggagaaaggggaagaaggcggcggtgctccttggggatggttgtgtgtctgagtttgcatgagtcagtgggtatatgtgtgtgcgaatttgtgggtccatgtttgcgcgcttgtgtgggtgttttatgagaagttgagaagtggttggttgtaatttgggggtgacttggggcccatgtgtttggaagtgtgtgtgtttgtatttgcacacttgtgtgtgatggtattagccggtatcatttgtgtgtgataatgtgtccgtgtgtttgtggtcctgtgattgtgcaccccatgtttgcctgtctggtgtgtggtgtgtatagtgggtgtctgtggtttgggtgtggttgtgggttcggggaactatgtgtcccatgtttgcatgtctggggtgtgtgtgtgtgtgtgtgtgtgtggtgggtgtctataatttgggtgtggttgtgagttcatgtaactgaaccccatgtctgaatgtctggtgtgtgtatgtgtatgatgggtgtctgtggtttgggtgtggtcgtatggttgtgagttcatgtgactgtgcaccatgtttgcatgtctggtgtgtgtgtgtgtgtgtgtggtgggtgtctatggtttggatgtggtgtgtgtggctgtgtttgcatgcctggtgagtgtgtgtatgggtgtatgtgtgtctgtgatggtggatggctgtgttgttgggtgtgattgtgagtttgtgtgaatgttgtttgcgtgtcacggggcctgtgttcacaaactcacgtgtgcttctgtgtggaactgggtgtgggttctgaggacttcggggacctggccaagtctccctcccccacctgggggcctcctggcacggaagggggtgaccagctgcctgggacctccgactccccacaggttcaggagagccccagctgatgaatattcatgaggtgggggggctggcacccactgccaacagctgcgtgtccattagtccccctccctgctcttcctgtactgactgcaaaggggagggggggtgtcggcgtgtgtctgtccctgtttccaagactcgggggcgggggtgtcctagggacaatcgtgggggcccagtcagcatgcctggctgcttgtgtggacggctaaggggctgtctcaatgttgtgacaggcactgggagagtgactgttgtgtgacaggttgtccttgtaatcgtggtgaggctgtcacccacggttgcattgtagctccttggtctggggactgtgggcgttgtgtggcagcgtgagtgagctgtgtacctgtcacctgcaacagggagactgtgagtgtgtgctattcgagtgactgtgaccagtggtctgtacctactggctgcctgctctgtgacacagtgacaacaagggtgtgttattgtgctattggaataactgggttggttcaaaccttgatcaagggacagctgcggtctgcaccctggggaggcagtggtcagagctgcttttcctccttgtgactgggtggggcggtgactccgtgtggccacgtggctagcacagctgcagggacatgcggactgagtatatcagtgtgcctctgctggccagtgtgacgttgatgtggtgtgagggtcagagtgtcggggttcctgggaggatgtgtgagaccgtgcagctgaggtgtgtgtcaccagaattgtcaagggtgtgaccgtagttcttcatgtgacagcgtggctgagggtgtgatggtgttgctgtgcaggtgacactgtggcagtgaatgcgtggatctttgtgtggttgaaggtgtgacagtgattgtgtttgatgatctgaaccaaagggctatgactgtcctaccctcacttccaggctgcacagggagagctgggtgctggagtgagggggctcctggcatgggattggcagctgcctcgccaggggccgcacgtcagcctgagactgggacacctggagatctgatgccagctggggcacagaacctcctccctccatcttcccctccataggctgggtttggaggagtggcctctagatgcagctgggaccagcagggggtggggcgggatgtgcttctctggtctaggggactctggcctctggctgggtggccctggaggccccaggttcccagcatacgtggcttggccaggaactcagtgtggccgactcagcccctctgatacccacaccctgggacggctgagcattgctggcggccccagcggcagcgcacagaggctcctttcacgagccagggccaggtttccagggcgggtgggtctccggctggcccgctgcaaatgaaacgtttccccagctccttccctttcgtctccagatgagcgacggccacaggaggccctggccaggctgtgctgcctaggcaagtgtgagtgtgtgtctgtgtttccctgtgtgtgtgcacgatctagatatctttgtgtgactttttgtttcttttttattttttttcaagacagagtctcactctgtcacccaggctggagtgcagtggcacgatctcagctcactgcaatctccgcctcccaggttcaagtgattctcctgcctcagcctcccaaatagctgggattgcaggtgtgcgccaccatgccctgctaatttttgtatttttagtagagatggggttttgccatgttggctaagctggtctcaaactcctgacctcaggtgatccacccatctcagcctcccaaagtgctgggattacaggtgtgagccactgcgcccggcctgtttctttttttgagataggatctcactctgttgcccaggctggaatgctcactgcagcctcaacctcccggactcaagtgaccctcccaccagattagctgggaccacagatgcacactctatgcctggagaatttataaattttttgtagagacacggtctcgctatgttgcccaggctggtcttgaacccctgggctcaaccgatccacccgcctcggcctcccaaggtgctgggattataggcgtgagccacggcgcctggcctttggtgactttttgtgtgctacatctgtggatgattttgagaacatcaacgtgtgtgacccatcgggtacatgcagtcctgtgtgagatttttgtgaacctgtgtgacttagtgtggcctgtgtgtacctgtgtaactcagcatgagattctgggagtccatgtgactgtgcgtctgtgtgtgtctttgcaacgcggtgtattgtctgggtctctatggggatctatgtgatggtgaaggtctttgtgtgtatgacctggctgtcactctgtgggtggctctgggaaggcctgtgtgggatttttggcgtgactgtgtgtgtttgtatgtctgtgtgatattctagaagggtgtgtgatggtatctgggtgaccctgtgtctgtgtgtcattctggattttatctgtgggaacagaggaggagaggaaaaggggggaggggagagggaaggagaagggtctgtatttctgtgtgtctgagtgtgcctgtgtatgtttgggtgcccctgagtgagtgtgatagtgagagtctggtgtctgcattcacatgtgtgtggtgtggttgtgggtgtccctcgaggtgtgcctcagaagcaacgacctgtaactccccaaattgagtccctaataggggcttctagaccaccctggaaggcagacagtgatttcaaggctaggaccccaggcccggagcacagatcatgcctaccacgctaagtacggggacatcaggccctcttggtgggagtggggatatccaggttctactgggggtgcctagagcacccttttctcccagcctggcagcacccatggcctggctccctgcctatgctacatgccagatgtttgcccacctcacccaagagccctgctcagttgccaagcagccctggagcctcacgttgcccggccccacattctgtgccccagaatgtggctgccagagcccagatgtttcagccctcccctcacccacatccacactgcccgcagcatcctggccaggtagtgccatgggcctggctgccgcttcctgctcctcgtcctaccccaacacacctgcatggtaggaacgcacctgctgctagccacagccaggtgggcagcctggcagggaggaatgtgggggattccagctgtggcatgccagctgtgcccagccccctggcggcaccctcctcccgtgagatttctcgaaggccaggtgtatcctaatacttgggccccggggagggggagagagggaggggcagcgctgccctctctggcagtccctctgccttcccataaattcttcccattgcagttgtggaggggagcagagtgagggagtgtgtgtgtgtgtgtgtgtgtgtgtgtgtgtgtgtgtaggagggtgctgtcagtgtagaggaggggtgctgaatgtggggaaagaactttgaatgaggatgtgtgtgtgagtgtgagagtgagtgtcttgtctgtgtgagtgtggatgtggtgtgacagttgtgtttgaatacaaggaagtgtgtgcgtgtgtggcgtgtacatggggagggtgttatgggaggagtatgtgtatacaaatggaagtgtatgtgtgttgtgtgtgtttttgtgtgtgaatggagggatgagttgtgtgtgtgaatgaataataggtgttctggtgtgatactgagtgtcatagagtccgtgactgtgtgtgtgaaggatgtgtgtgtgtgcacctttggaagtctggtgtcctgtgtgtatgaatggaaggacaagtttgtgtttgtgaatgaaggatgagtgttgtgtgggtgtgaatgaagggtgtgttatgtgtgtaaaaatgaaggagagatggccgggcgcagtggctcacgcctgtaatcccatcactttgggaggctgagacaggcggatcacaagatcaggagattgagaccatcctggctaacatggtgaaaccccctctctactaaaaatacaaaaacaaaattagctgggcgtggtggtgggcgcctgtagtcccagctgctcgggaggctgaggcaggagaatggtgtgaacccgggaggcggagcttacactgagccaagatcgcaccactgcactccagcccgggtgacaagtgagactccgtctcaaaaaaaaaaaaaagtaggagagatatgtgtgtggatgaaggctgggtgtcgtgtatatgtggatgaaggatgggtgttgtgtgtgtacataaggaaggctgggtgttgtgtgtgtggatgaaggctggggtgtgtgcgcgcgtgtatggaaggctgggtgttgtgtgtgtgcgtatggaaggctgggggtgtgtgtgtgcgtatggaaggctggggggtgtgtgtgtgcgtatggaaggctggggtgtgtgtgtgtgcgtatggaaggttgggtgttgtgtgtgtgcgtatggaaggctgggtgttgtgtgtgtgcgtatggaaggctggggggtgtgtgtgcgcgtatggaaggctgggtgttgtgtgtgtgcgtatggaaggctggttgttgtatgtgtgcaaatggaaggatgggtgttgtgtgtgtgcgtatggaaggctgggtgttgtatgtgtgcgtatggaaggatgggtgttgtgtgtgtgcgtatggaaggatgggtgttgtgtgtgtggatgaaggatgggcgttgtgtgtgtgcatgtgaaaggatgggcgtttgtgcatatggaaggctgggtgttttgtgtgtgcatatgaaaggctgggggtgtgtgtgtgcatatggaaggctgggtgttgtgtgtgtgcgtatggaaggctgggtgttgtgtgtgtgtgtatggaaggctgggggtgtgtgtgtgcatatggaaggctggggtgtgtttgtgtgcgaatgagagcctaggtctgggccaggtgcaaggaccaggaaggccatgagggaccatcagcccaggagcccggggcctgggggctggtggtcacggctggagcacaggctggcaggtggggtagggcagccagagttggggtttctgagccatgtgccccctcacagccatttgcaggggggtgggcagggtctgcctggctctcaagatcctccaagcccccagctccatgaagggtctcacacctccccgggccctttcccacagcttccccctcagtccccccacagacccacactgctctgctgtcctcttcacccaggacccccagatcccccagacattgcctctgctcctttccacagccatctgagcccccgccctgcctccatcccccatcactccctcaaagcccgcatgtccccaactccttctcccagacatcccagcctctctagggcccctcaaaagcccccagacgcttttccgttcatcccttctgccttttccagctcccctcccctccctacacctggacccccattctgtcctctacccctttccagaaccatccattcatcggcccaacccccttgatccccaaatccctttctggcccttcctccagccccttaccgctcccagccccccacggggccccgccccttcccctctgcgcccccacccccacccccgctccgcttccaacccctcccccgtccgccccttggagccccctccctcttctggggcagcggtggtgtggaggcaggcagccgcagcactcctgaaactttaaacggtgttaaaagtttctgtttacgagaaacccttgaatttttaaggacatatcgattccctgctccacagccttgcctcggtggcgtggcggcctcaggcacagtggggaggcccagactggagggagccggggttccgaggcccccaagcaccgaatgacagatacacgcctacccagacacactctcaggcacacagggacgcgatccctgatacactcacacacacacagctagtcacacacagacatggcctgacacagacacacatatcaggacacacagagacccctccctgacactgacacacgcatacaccagtgtgtgtatacacacaccgacatggcctgacacacacacagactcacatctctgacacaggtttacattgacccccctccctgacacacacacacccacccacacacacccacccacacacacatacactcctagttacacacactgatatggcctcacagacacacacattgacatggcctgacacacacagactcacatctctgatacaggttcacagggactcccccttccctggcacacacacatacacacacctagtcacatacactaacatggcctcacatagacacacacacacgacctgacacacacagacacatgtatctggacacacagagacctcctccctcatacacagacacacacaccgacatggcctcgctctcgctctctctcacacacacaaacatgcacacacgcatggctacacacactctctggcatggcctgacacacacaggctcacatccttgtcacacagagcccccatgtcctgacagccctgatccctgacactcctgagcacctgtgtacacaccctggtacacaaagatcctcatcaccgccctaggtccacatagcaaaacacacacctagtgacacccattgacactttctgccccacagaccctgatcacaaacagggctggctatgcccattgggctcttgcaagcaggtcccagacccactgggacccttgcacagtcactcacgtgatcacacttcaagacacacacacacacagacccatatacactgacactgcactgttgtccaggctggagtgcagtggcgcgatcatggctcactgcaacctccgccccctgagctcaagccatccttccacctcagcttttggagtagctgagaccacaggcacgcaccaccacgcctggcttttttttttttttttttttttttgtattttttgtagagatggaatctcatcatgttgccaagctggtcttgaactcctgacctcaagcaatctgcccatttcagactcctgaagtgctgggattataggcatgagccaccgcatccggcctacactgacactttttttttttgagacggagtctcgctctgtcgcccaggctgaagtgcagtggcgtgatctcggctcactgcaagctccgcctcccgggttcacgccattctcctgcctcagcctcccaagtagctgggattacaggcgcccgccaccatgcctggctaatgttttgtatttttagtagagacggggtttcaccgtgttagccatgatggtctcgatctcctgaccacccgcctcggcctcccaaagtgctgggattacaggtgtgagccaccgtgcccggctggtgtttgcttgcttgcttgcttgcttttctttttctttctttttcttttctttctttcttcctttctctttttctttttcttttctttctttctttcctttcttccttccttcctttccttccctcctcttccttctttctttctttcctttgtttctttctctctctctctctttttctttttttcttttcttttttttgagatagagccttgctctgttgctcagtctggagtgcagtggttcgatctcggctcaccgcaacctctgcctcctaggttcaagcaattctgcctcagcctcctgagtagctgggattataggcgcctgctaccatgcccggctaaattttatatttttagtagagatggggtttcaccatgttggtgagtctggtctcgagctcctgacctcaggtgatctgcctgcctcggcctcccaaggtgctgggattataggcatgagccaccacgcctggccatggtctttattttcttcccccaccatgtccccagtgcttggtataggaccgggcaggcaccttctctgcctcatgacaccttaagtacaaagtcagacccagtctctgctgcacaacatacagatccacacaaaaagattcttgctttgttttttaaaatttttattatttatttatttatttatttatttatttatttatttatagatggagtgtcgttctgtcaccaggcaggagtgcagtggcgcgatctcagctcgctgcaacttccgcctcctgagttcaagtgatctccggcctcagcctcccgagtagctgggactacaggtacacgccaccacacccagctaatttttgtatttttagtagagacggggtttcaccatgttggccatgatggtctcgatctcttgacctcatgatctgcctgccttggcctcccaaagtgctgggattacaggcgtgagctctccctttctctctctttcgttttgagacagagtcttgctctgttccccaggctggagtgcagtggtatggtcttggcttactgcagcctctgcctcccaggttcaagcgattctcctgcctcagcctccctagtagctgggattacaggcatcccaccacgcccagctaagttttttatttttagtagagacagggtttcaccatattggccaggctggtctcaaactcctgacctcaggtgatccacccgcttcggcctcccaaattgctgggattataggtatgagccaccacgcccagccagactcttgcacctatcatgacctgcatttcttcagtgtccccggaagacaccagacccatctagacacccacagacacactgcctgccacacagcctaatacagtattgtgacaaggagcatatcgtttctgggacatttacacacatactcacgtacacatgcatacttttgtgcctgcttgcaagagcccaatgggcacagccaaccctgtgtgcgtgcgcaccccccgccctgggcactgacaccccctttaacagacaatgcatagctgagaattgccacagctttttggcccaagagagcaagaaggtgctggttgcacctggcagcaggcgggtgttttgtctcagcaggagctgcctgggggctgtaggcactgcctccccacccaccctgagggttaccagagggcttcctctccccttgctccagggtccccagcactacctctccccccaggcctttatgttctgaaaatgaggagtcagggcccgcaagaggggctggaacctcaccaaagtgtgtgtgtgtgtgtgtacatgtacggaggccctgatgcccaattctgtccctgacagctgagctgtgggtctcctgctatatttgcctatgtcgatgatcagggccacattacaagtgtgttggggggggggcacgtaagggacatgggtgtatgtgtgtgatccctgtgtgcatggctagatgattctcccaggggggttgtcagccgcctgggcatcagttggtcagtgtgtccaaggcctgtgggtacatctgggcaacccagtgtgtgtgtgtgtgtgtgtgtctgtgtgttgtgttgtgacagccagtgttgctttgtatctgtgacgctgtgtatctctttgtattggggtcctttgcattcacttccaggtgtttggtgtgtgtttatgtgacattgtgtatcttcccttcattagtgtcatcttatttatttagttattttttttcagacagggtcttgctctgtcacccaggttggagtgcaatggcactatcatggctcactgcacccttgacctccccgggctcaagggatccccccacttcagcctcctaagtagctgggaccacaggcatccaccaccacacccagctaatttttgtatttttggtagagaggggttttgccatgttgtccaggctggtcttgaactcctgagctcaagcaatccactggcctcggcctctcaatcatcagtgtcattctgtacatcggggtgtactgccacaactgccagtgtgttctggcactgcgatgtgtgtgtgttgtgtatgtgtctgcgtgtaggaattgtgtgtctggaaggtgtcagcgtgtggctgtgtgatcttgcatgtgtctgtgttctgcaggaacatgcgtcagtgtgtgtgcatcagtgtgcatctctatgtgtcatgcactggtgtgtcttcgtgtatatcagtgtgtgtctacgtgacgcctgctttggtgtatgtctatacgcggttccttgttgtgtgcctggataccatggtgggacggtgcatgtcagagcgtgggtcgtgggtgttttcccagactgctgtgtgtgtgtgcccgtgtgtaggggttgtgtgtctgtgccttgtgtgcactggtgtccgagtgtgctttgtgttcgaaggcggaacgtgtggccaggcgttctggacgtgacatgtgtggcggggtccgagtcccgctgcgtgtcagcgtgtgtctgcgctggaacgcgggccagcacgtgtcagggcggccgcgtcggtgtgcgcccccgcgcgcgcgtgtgcgtgtgttcgtgtgtgtgtgtgcatgtgtgtgcttgtgtgtgtgcgccggccgccgctcccccgccctgcccgcccctccccgcgcccctcctcccgcccgcgccgcccgcccgctccctctccccggagtgcgccgcttccaaactttgtctaaactttcactttcacagcgcggcggctgcggcggcggcggcggcgggcgagggtgaccggccgagcggcggcggcatggagtagacgcgcggcggcagcggcggcggcggcggacgcgagaggcagcggcgagcgcggcggcggcggcggcagcggcggccccggagccggcggggccgagcttgcgagcggcgagcgcggagcggcgccgggccgagcgcggggccgcgggccgggcgggcgcagcgcggcggaggccggaggagccgagccggagcccgagcccgagcgcggccgccgcctgccgggcctcccctcgccgcggccggccgccgcgctcccgcccgggcgcccagctatgtactccccgtactgcctcacccaggtaccggccgccgcccccgcgcgaccgggggaggggagcgggcgcgggaggccggccggcggcgcgggcggaggggacgcgcggcggccgggaagggggggccgagagcccgcgggccgccgaggggtgcaggctgtgccgcggggagcccaggcacgcgtgcgggcgtcaccgtgcgcgtgcgaccctggccaccgggcggactccttttgggggttccgggggtggccagctgcgtcgtggcgctgcccgtggagcgcaggcgggagtgcgtgtacgtgtgtgtgtgtgtgtgtgtgtgtgtgtgcgcgctcgactggggtgcgatgggcagcgggactccggctgacctgtgggctactgtagcgcgcacccgggcagcgtggtcgctggcagtgtttgcggggttgacagagtggcaagagggtggtcccgagggcgcagaggggacactgggtcccgcgacgcttcctggggagggcgcagcggttcccgagggtggcagtggccggcgtgcgtggcggcggcccttgcgtgcggccggggtgcctggggtgggccgagcggcccgggcgtctccccaaagtctttgtttaggcctcacatgggagcggggctaagaaaatggcggggctcccaaatttcggaggggcaggggaggggagaggggggcgggcgcgctgccagcggtggccgcgcctctccgaccccggacgtcgcagcctctgcccccccacccccaaactttcctcggcgcaaactttctggccccagcgacccgggctgctgcggagtggacccggcaggcctggggaatcccgtcccgtcgcctggaggcgggaggggcgggaggcagccgtggacacagccgacagtgctgcggccacaccgtcgggtcagcctcgggcacaacagcgccgaccttggcgcgttgctagagcgcgtcccgcctgcagcgaagttccctgcgcggcgcacggctgcggcaaaagcttcgaggatgcctgtcgggccacccaactctccctgggctgtggcctgaggctctaagagggcacagaagctgcccagagtcccacagtggccctgacagcgttgcctgcagggccaagccacagctggtaacagtctccgaagaggggacatctaggggctgcttagccctgctgccagccaggcctgcatgtgggggttctctaggccaggccctaattgtcccctctgcccagcctgatccttgtcagccatgtgccaagtgtgtccacagcttacagtggcagtccacatgggtatggctcctactttgtctgggtcctaccgggagtgtgcagtggtgtcaaggggcgaggggtttgtcggggtgtgtgtcagctgtggctacaccacactcctgtatgcacaggtgagagtgtatgcaagtgtgaatcaatctagagtctgtgtgtagcccctgtgggccggccatgggcaggcctgcgtggcatggccgtgtgtgtggcccagggagcgggttttcctgtagaaagcaggcccaagtacgtgttggcgagggcgcaccggcatgcatacatgttgcagtgtgcatgcaggtgtgagcaggcaccctgagcaccatggcagtgtggggaacccccacatctgcacctccagttccacggccactccatgttgggcgcccctcacaacaactgcctacccagcggtgtctgagctgggcctctttggtgctacacttggctgggctgtgtggccgatgtttggggcctagtggaaccaagaccccacgctcaagcagccccttgcccaccaggctgccagcccggcctcccatgccaagcacgccagacatctgagcctgctcccccatggcttgggtgagacaccagcccctcagatttcacagcaccctgggagagaaaatgcctgtggatacgccggtgacatggctaggaaggggctggggcggctgcgagacccagggcgatggccggtgcttggctctgtgtgattgtaggcccaggttacgacagttccagtgtgccaggatggctggagaggggagtgggcatggtgtctccaggctgccagcccttcatggtgggcagggaaacccttcagctctgggcaggtggctgctgtcggctggtcagtggggtctggcctgcccctccctaacaatcacatctctgtttttacaaatctttctgcttccatggtttgccccgctggtctctgtttttatgacaacctctttcctttgctgtctttttctcggtctgtttttatcggtctctggtgtattctgcccttttccatctctctttctccatctctgtccttttgtatgtctctgactgtctctgtctctgattccagttttggccccatctctgctcccccctccactggcgtctcggactctctctctctctgtctctctggcctgcctctctctctttccctctctctctctcccttttctttttttcaaaccagaattggcttcgattttaaagtcaataaatgattgagcaggaacgagcttggagcagcggggccctggcggggaaaggtactgtgggcgagggggaagggcggggggaaaaatctccttctagaaaaagcatcgaaattcagggcggccgggtggggcggttcctggagctgctggagtccattgtagccacagtcctgagtctcaggcggagagaggggtggggggtggatggatggacccccatccccatcccaaccctgccaagaaacagagacacaaccaggatgtgaactcacgtacaccaccatcaccgccaagatggggatgtaagtgtcctgttcacaccgatgtccagacccacgaccatcgacgagcctacagacctacggacacaggaaaccgacgacttgtgttcacactgtcacacacacccattaacacacacgcacctcttgaaatgggacacgtatattggtgtaggcttagcgacacagcagtacctctttgacgcacgtatggacacaggaaactgtggacttgtgttcacaaccacccccagcgcacacataaacactcacaaacccctcgagatgatacagatagcgacgaaggcacatggagaccacgacacctcccagactcatggagccctgagcacatgcttggatacaggtagacacaaatgtgtgttcacccccacacatgctcacatggacccaaggacggacaggcggatggatggatacacatctttacacagagacataatgcagttggctcgctcaggtgtgtacacaaataacttttctttttctattttttttttttttgagacggagccttgctctgtcgcccaggttggagtgcagtggcgtgatctcggctcactgtaacctctgcctcccgggttcaagcaattctctgcctcagcttcccgagtagctgggattacaggtgcccgccaccacgcccgggtaatttctgtattttttagtgaagatggggtttcaccatcttggcccggctggtcttgaacttctgacctcgtgatccacctgcctcggcctcccaaagtgctgggattacaggcatgagccactgcacccggccacaaataccttttcaaacacacacacacacacacacacacacacaaatatgcaccaatgcgtgcttccccctccttgccacagggataaaaaggcaaacatgccgacatttgctgacacacacaaagacatacatggccgcacacacggatacacccgctctcagacacgcagcgacctacgcccattttcctggccatacaagcagccgaacgttcctgtacttctgtatctgcatagctcccccaacactccttccatgggagggggatggctggggcttccctgatgcccccttcccccagctttctctctgggtcactctggccacccctctgtccctgcgaagctatagctctctgtccctgctccggcctggtgccctgttttcatggcacttggcattttctctccggctctggccctgcctgattcatgcccactgctggggtgggaggtgtgcccaggtgtgggccgggatggggtagctcatgagatgagctggggctccgtgagatgttttgatgctgggccgagctcagagccgagggctctgccgggaacagggtgctccagtctctctagggcctggaatgtcttgtgtagcctcaagagctcccagacggaggctgcgggagcggagtcaagggctaggctttgccgtcagacagaaatgggttcgagctccagctctacatgttctaatcttgcgacctgaagcacaggattttcctggcctgtaaaatgggcaaaaaccagtgtctatctcttgggctgtacttaggttcaatgtggtgcctggcacatagtgtgtgctccataaatggtaattgttgccaattgttggttgtcaacctcccagaccctcccagctgagagagggatgcctctgaggggtagaagacaggatcgagcacctcccaaccatagatatccaagtggactgcctggaggaggaggaggcaagaggagagtttggaaggatgagagtttgcacatggcccagctcttttacctttggatgggggcctgtaggccaagcagagggtggcacaacttcaagataggggagagatggtgggggagagtggggggcaggaggggagagacgaggcctccactgttccatgaggaccagataccctggttgggggccctgagtcctggtataagagtatgtgtgcacgcattcatccaaatgtatgtgggacaaagagacccggtgcatctagatgatgacttcagggacgtccccaagctccagaactttctgtgtctgcacctgggcgttgtcacctggacccgccatggagacaggacatatgtgcaggaccctatggtgggcacttggctggatcagggcacattgcgggtgggagcaatgctgggtgtttggccgtggcgccgtggctgtgggcaaaatgcccccgtggttggtgtgttgactgccgtcctccccatctaacccacagggagcctggccttttaaatctgctgagatattgtctcccccacccccatgaagctggaatctggggacttgctggaccagagaggtaggggaggctgggcactttctccaacacggtgctgagaatgggccttctgtcccctccctcccagctggggtggggaaaaggaggggggtgtcttaattttcttgcccccaaagccctggatgtgggggcaagtgggccaggaggacagctgtgagccactatctgggttctcccagatcggtgtgcatgttaatcggcatgtcaggcctcagagccaccattttcccgaggatgtctgtgtggcagcgtgtgtctgcccgggtccctctccatgcctctccatgtctcccagcgtccatcactgggtgctacctgcatgtgactccacggatcatcgcacgccctgtctcttgtgtatttggtagtgggggtcggggagcgtgccaccatgcgtgtcagtgtgccggatgtagtctctgtgtcacggtggcgctgcgcacgtcaacgggtattggtgtaccggtcaccatctttgtatctgcgctttgtatctggggtgacagtgtcccagcgacatgcgtcacatctacagcagtgtttttctgggtgtctgtgcgtcacggcaaagagtgtatccgtgtgtctcacacacgtgttggcctgtccgtgtcaacttgtgtccacatacgtgtcaacgcacgtgtctccagtgtcatcaccctcatatcactgtgcctcctgagcttgtccccgtgacaatcactgtgggtctcaccccacgggcgcctctcctgggcattcccttggcctccgagcaccatgtgagatgcctgctatggcggccgggcaagcggctgggagcgggctggctgctcagtcccttcccatgaggttgagcggccgcagtggccttgctgggggccccgcccgtgcccctggcctggcgtggacagaagcccgttgtgcggcagcgaggtgcgggcgtgtgttcgggccgcccacaggcctccctctgtctgcccggcgcacattgatcttggcttctgcctgtgtccgttctagcctggccagctgggtgtccggctgtctccgtgggcctgagcccactatccccgctgcccccacagccaggcaggccctgggccccacacccctgggccacccgccatccctccgaggctctgagggcgcggatttggaaactgaggtccccccttctttccccctttctctctctctctttcctccctctctcctcccctcctcccctcctcccgctccctctctccctctctctctcctcctgccaaacgcgtcttggctccgtctgaatatctctcctcctcgatttttggctccagctctgggcgcgttcactaaaggaagaagggctagctccccaacccccccttcctcaccacctcccccctcccgaggagcccctctgagggcgggagtggcctcgtgcaggggcctgggccccctgagtgggcttggccaggggggcacaggcctggcgggtgagggaacagggtggacagggcctggcagccagagggaggcaatgggcagggtgactgagctgcccggcggggcgggcgggcagggaggggtcgggggcacggagctggggtgtctggcttctggtggggctggcaggcctctgtgaggcgcagctgtgcccagaactccaagttgcgtttgccaccactaccgatgtggctgcgccagccagggaggggaggcgggtagcgggcactgcggcgctctgcagccaatcggaagccggggttgcactggggagctctccccccactgggccccaccctgaggggagccgggggtggtggccagcagtgggcagggggcagtgcccaccaccatcgccaaggaccctgccccctcagctgaagctcagtgccagccttcctggcacagatcgggcaagagcggggatctgtctgtccccacctgaatctgtgtgagccaagctggaggaaaggacagcatggaggtgcacccgacccccctgggccttttagtccaaggcaggcaggagctagggatgggttccaaattatccaggtggttccgtccaaatatcggcttcggtcgaatcatcttggggagttgggggggggtttattccgggtccatctcacacaaagtcacacactctcactggcacatgcgggcacaaagaatcacgctgacacacactggcatgctgcacctccctcaatcaaacagacacaggcgtccccatacaaagaatcttgccctcactcacagacaccttgaggcacccggccacacccgaacacatcgatgcggcattacacactcagggacgtgcatgtgggtgcagacacacgggacacgcgcagtcacacgatcacatgccatgaagcacacagcacagacacaggctctgccaccgtcaaatgcagccccacaggcacagctagaaacacacagcacacacactcagtcataatgtcagtgcccaaaacacacacatgagcaccgatacacccgcacatgccaccaagcacacaggtacatgcacatgcatgcaataacacgctctcagacacacaaaacaccccacacactccctaacccagtgtcacccaccaggagtgatttcacccattgggaaatgtctggaaacattttttttttttagagacagactgtcatctgtagcccaggctggagcacagtggtgcgatctcggctcactgcagccctgacctcccaagctcaaacgatctacccatctcagcctcctgagtagcagggaatacaggtgcatgccaccacacctggctaatttttaaatttttttgtagagacagagtctggttatgttgcccaggctggtcttgaattcctgggctcaagcagttctcccgcttcaccctcccaagtagctgggactacagccgagcaccaccatacccagctaatttttaaatttttagtaaagatgaagtctggctttgttgcccaggctggttttgaattcctgggctcaggtgatcctcccgcctcggcctcccaaggtgctgggagccatgagccaccatgcccaacctggaatcatttttggttgtcacacttgtggagggggtgctatttagtgagtggagacccaggatgctgctcagtcccctacaatggaacccctcaaccctcgccgaccacaaagaatgatccagccccaaatgtcagtagtgccaaggttggaaaccctgccatgcatccccagatacacagtaacacacacaggcacagctaacccttgacactcattacacatgcacccacatacacagtcacacccaaacaagacgccagctgacagtgtcacacacacacactctccctcactaggacccaggcattgtcgcatatataccccatttcccctgccaaacccaggcacagtcggcgtgccatgtacacagtccagtgttaccccagcacacagggacgagagccacacccccacacatattcgcacctgggccacacctggcagtggttggaaatggtgcctgagagctgagacctgccctggtggcacctcccctctgcttgtcagccacaaccagctgtctttgcgcagcagctacagccaccccagcttctcaggatagaattgggagccccaaatccctgccctggtttgtagaagcctggggtgagacaaagcctggaaaaaccacatgcccatccctgcccaggacactcgcagtcttctagactccgtggtcgagggctccaccctcacctccttgctcctggcagccaccgagagaagggatggggacaaagctaggttctttttttttttttttttaaacagtctcactctgttgcccaggctagagtgtagtggtgcaatctcagctcactgcaaccttggcctcccaggctcaagcaattctcatgcctcagcctcccgagtagctgggattacagatgtgcactatcacacctggctaatttttgtatttttagtagagacagggtttctccatgttggccagactggtctcaaactcctggcctcaagtgatccgcccgcctcggcctcccaaagtgctgggattacaggcgtgagccactgtgcctggccaacaaagctaagttctgagactcctgtcctccgtggggctgtctcactaatcctttggcctttgactccccagttctgaccccagagaaagaagagacagcggtcagcagaatggtagaagaagataggataatagcaaaataaatgtttgtcctaaaaatcgtagcaacagctaatgtgaactgtgtgcttgctgcgttgcacccttgctaagtgccttcccagcttgtcttcttgaatcctgtgttcagcaggtactgttattaggagagtggggcctgcagagccagcttcctgggtttgactcctggctctgccactcactagctgtgtaacttcaggcaagttgcttaacctctctgggtctcaatttctgtatctaggaagcagggctgtggtaaggatctgaggagttggttcacagcacacgctttaaaactgtgcttgatgtgaaaacctgctttgattttatggatgaaaaaccaagactcagtagaggtatccagtgctagggtcaagggcggggagctctttcttcaagatcgtcaccaccctaaatcctgccgatgggacaaaattgcagcttgttctctggcctttcccaaatttcaaaatgggtctgcacacccccacgcccccatttgaaacgtgccctagtggttggcccttgaacctttcttaccactctgacctttggatcttcttccatccaaggctcagaataaaggtggatggtggtctcaccccctctgcacccctgctggccaggcttgccctcacccccgcaggtccaaacatcctctcccacaccttgctgggcacccagccggagctcaaatgctgggggtgcagccgggagcctgtgcattccttcgacaaatatttaccaagcacctcctgggtgccaggctctgttttaggccccgggggctcggcagggagcaaaatctgcaaagatgccagccccggtgggagggcagactgtgaatctgataaacaagggagtgtccagtccttgagatggcgctaggtgctgtgggaagaacagagctggccgggccctcgggagtgctgggcagctgtggttttagcagaggtgggcacggagacctcatggtgagatgatgattttgaacgctgccttgctatagctcaagtgcagcccaccaggcccctttctctctccagggggcagactggaggtcaagggtgtgtggctcagcatggcatgcccatcatttgcccagaccatgttgcctgtcatttcttcaatctgagctcatctattatccatatttgtggatatgccatacggtgcccgcccaaaatctggggacaagatggccgaggcctttcctttacagaaactggggcttgatgggcactgggtattcgcaaccctgctgctctgagctgggggatggggcaggggcagctggtggcccagagtggcacttccacctgggcccctcaatttagctcccccggggcgggctgggtttatttttaccccagcctgtcaccctggcagtaccaggctgcgccatctttgcagggtcttggggatctgcccacagcttgggggtatcaggctttgtctgttgggttccccaactcccaccagggccccagattctctccacccccaaagctccaggcttgagagctctgggctggggcccggcggggtcggcactgcaggctggcaaccaccgtgcccagcctggtggcatttggtttggcgccctgcctgcctgccacccccaccccatgcccgggcagagccgagcggctgctgctgccagtctccatttcgaagcttgaggtgggggtggggaagtgctgggcgcctccaggcccctgcttgtcccgtgccacctggggatcatcccccatgcctgttccctggaagggccgggctgcctcttccgctgcccctttgcagcctggagctcagcaaggatgcccgcctggcttccatcttcccggttcgctccctcccttcctccccctctcgcctgcttgcctgtaatggctcaccatttttggcatctcttccccctccccccccataggcgccaacctcacttccaaacccgccgccatcgttggctctctggccttctctgccgcctggggctgggacctggaaatgggaatttgggggtgggggccgggcctgtggacatcaggggctttctgcgtgctcgtgtgtatctctggggttggggggcacatgttctaagccagctcgctccatccaccccttcatttgcctcaagcttgcagagcaggactgcagcaaaagtgacgaccctcccatttctgattgccctgcacctggtattggcatctgggccaccagggggctagggtgggcatctctgcccaagcccaggccctggcatggcaagggcaaggcttcatctgtggtgtgccccaacctctccctttccctaagttccccccaaggttccaagattcctgcttccactccccagagctggagtgggggaaccaagcctcgccttcggtacttgtgtccccagatggggcaagggacttcggaggaaccggtttaatgccctcccccccaccccacacccgctgcccgcgcctctctcggcactaaacaaagtttgctaagtaacttcaaatgttatttgaggacggcctggcctcaacccaaggcggccctgtggaaacttgtttttcgctgccgaggctgcaagtatcaaagacacactttcggtgggggggtgctccaataccactcccccctctgtggcaggggctggccctgaatggacacacagacacacagagcagacacacataggcctgtgcctacagagacacagacatcatcctgtggcctaaacaccaggtacagctgcaggacagccttggagcatggtacacataatacatacaacaaacacacatgttgacaagttaaggaggtaggagggggtgacagggcactacccctcagcccatggagtcctgggattcttccagctggtggggtttcgccatgttgggaaaaacgtacggctccgatccttggggtcctgtattctcatgactccagggcttgagggggtgctgggatgaggcccccagcctcagtttccccatccacagagggacactatggacttttcagcccagcctgggttttttcatccccctggcagggctgcatccctaaaggtgagtccctaaaagtgggctctgagcacagggcctggtatacaagcaatgctccagtgtcggcaggcatttctgccagtcctgaccccataaacctggtgtgttttcatcctgattggtggccctgaccccaagcagcttggggttctccgggtcccgggaggagcccatgctgacgttactcgcttgctccaatcttcccgtctctgtgattttctcactttgttcctctctttctctcctagcttttcttgatctttccccacatccctcttcttctttctccaggtctccgctggccctgcccaggcctggagctcagggaaaacgtgggaaacaggcatagggtacgcatccctcactgaagccagccaggcctgcagtcctccatgctctgagccccctgatgaccctcctttggcccccctccaaaccccagcaagaagctggaggctgggtacttgagctgacacagtaggtgaaggagaggctctgtcacagggtcctctgagacccatcacctccaaggtttgcaaacaggtggagccccactgaatccgatggaaaagccaaggcccaagaggaaaccggagtgagttcctcctgcagttccagagagcctccccatcctcgctgtagccaggtcctcaccgaggtagatttgcgggggtctcccagtcccagtcccacacactgcctcatccccactcacagtcaacgcccgcaacaccccgccacccgcagtctgtcgcgcagtgacagcctgtcacaagcaccgccgcacaccggcacaatctgtcgtccacgcacagtctcacacacaacctgtcacacacgcacacacacacacagcggcacagtcgcacacacagccagcctcacgcgatcacaccaagcgtcacagcttgtcacagccatagattcctcacaataaaaataacagctaccgactccagagcaattatgcctgggcagcgggtgggtggggggaaggcgggcatatgtgacctcctgtgaccctcccaacacgaggcaggtatgagtaacctgttttacagatgaggaaacagaggccgcaaggtcaagtgccaaggtcatggggctagaagcagggtggtggggattacccagccagattcccaggagtgagcaagacttaaacaggttcactccagcttttcatcccccttctggccacctgaggctcctccttctggccttcccatgggaattcccttcctattccccagttctaagaagcccagagcaagaaacaggaggaagaggcttcctgattccccgcttaagggtgttcaaactgtctgcccctggctgggaaaacagggccacgccctccccaccaaatgctacttggctccaagtggggtactgatgggcactgaaaaaccgatgggcagtgagggctatcagaggggcaactacaagtacagtagcactaggcttgagtgtctgatgtgtgagtggccatgtggacggctggagttggtccgcagtggtggcagcttgtggtcctttgggggatttggtggtagaacggggccgggggtcttcaaaggcagagaagtctcaggacttcaaaccaacagcctaaccctgtccacacaggtggagtggcccaccttgggcccgggggggcctccaggagccccctggcccaggcaggccccgcctccaccgccccaggggccctccgaggtccagggcgcttcctcctctgcaacccgcttttcccttgctttccccttctttgttcctcccccgcctgctcctggggcttcccccattggagttgcctcggccaaaaccaacagggctccaacgacatcccgccttggcctgccgggcgggcggccggccctgccccatggcccgctcaggggccagatccgggctcagctgggtccggacggcggccctcgcgcacgtggttactcccaaggcgtgcgcaagcactcgcacaccccctggccctgcggccccgaaggggacctaggcgcgctcatgcacgtccctgtctgacaccccagcccggcaactcggacgtgcgcacgcacataagcacgctctcgtatagttgctcccacctgggtccgcagcatgcccttgcccggcgcccccagtcgggatctcaggcaccgaaagcttatatgcgcacctaggcctgacatcccaacgacactggctggcgcacttacacctataacatgcccctatcgggcaccacatgggggtccctaacacaagcattcactcccctgctttccctccgatggagctttcgagcacaggtactcgagccctgcgccccaacggggagctccaggtgggtccgtgagcccgctctggtgcccacacacatggctccaggcccacgcgggtacacacctccccagcctgcacacgcgtgtttcacatgagtcacacacctgccaggccgctcagggcatctggcttcaaagcggcattcaggttgttgcgggagccggcagggaagggaggcctaattccacctcccccatccctctcggaacacccgcctccccatatgtccctggggcacaggtgggacatcccagaactgccgctgcccagtggcgcccctgcatgtgctatatttatatttgaaatttgtacctttatatatactttttatatgtaagaaccgctcccccctcttcccgctccacgtttgtacttggattttaccacccccactaggcttcgacccaaacctgcaaaaaccatttcgccaggcagggatgtagggggaggcgggagcagccctccccctctccactgcggacggacatcccacgttcttaaagaccggggaccccccctcccccaagggccggactgcagctccgaatcccgcagccccagaaacacaatcgcgggggtgggtgctggcggcgagacgttgctttttggtgtgtgtttgctgttaccgcttaaattaaccctgagtgacggcttgcaattcgccacaaagaggccatttaatgccccccaccaccccacctcgggagaaatttccacttgcccccgagtccagctcgggccgcacgctacccgccctccaggccttcgctccaggtgcgcccgggcggtggaggcgagttccctgcgcgcatcatggacttcaggagtgagggtgggtgggttttggaggggtgggagcagaggcaggggggtgtgccgggactccccagacgctccactgcccaatcatagctctttgatatcccagcccggctggagaaagttagatggtactccagcgtctcctccgggtccccggaagagagaagctgggctgcaccccatgttggcacgaacactccctccccagtgcctctgtgcattaggtcgcgtgcctgtacgtaccctacctgagaccgcccctccgccaagtgcgcccctcgacaggtgcccgtcgcccacaggctcctttcattgtagcctccctggaggttctcaaggcgcctggcatttcctggacccgctgcaactgactcaagactggggggagggggctcatggaggtagaggtggtggggaggtctccccagggcccaggcaggaggagggaaggtcgtgtgctttccatgtcgcgggcaaaatgggtgctgacggtcactgtcacttgcatcgcacactgaggggtgggagaggacagcacatgcctggaccgtgcaggaggcccagaaccggggcgcgaaggggccgcgggacacgagcgggccgtgcgcaaagcctggcgcgcgcgtgcgcagcgacgaaaaggcgggaagcggcgcttcgaggccccggatgtcagacgcgacctgtgtggcatgtaccaggctggctccgacgacggaaccgccatgggtgctgagtggagagtggggaccgcggaccccgggggcaggtgaggggaaactgggagcataggtctggctttcgaccgtttgtgccgccagagtcttctcaatgatccctcccaggcaccgtaggccctctagtgggtctgggtggcgtcctcccggcccctcgctgctcaagcgcggctccctcttgccggggcgcggcctgcccctcacagtgacccccccgacccaccccccaaaaagtgaccccgcgctggtgggcatggaggactgtcccagttcaccatttgctgcgtcaaaggccgccgccaaaaggggctccgatgtcggcatttttgccttaaggctagtttgtcccccaggcgcgcgggggttgggggttcagggccgcctgtgcctcagtttctctcctcctgcgcccatcctgacatccgacggaggataatgcgcgttggagggctttggccgtgaatgcgatgttgatgattgctgtgattctttgggtgcttgggagagtttggggtttaactgcccccaaatccgaggacagcttgggggcgtcccttcggagaggatctctccgcgtcgcatagtgagcgtcgtcatctctagactaccccggtttccgaggagcctcaccttcaatccccgagccttctcttttgggggagtaaaggcggggaaatttaccaggggagatttttgtttccagggttggctgggtttgggggattttgtcctccagcgagcgcggggaagaaatgtgactaagtggcagaaaatgcgctttccctttctctctcttctgccttcgggccgcggggagttgcgcagactctaaaaaaaaaacctttaaaaacccaaaacctcccctccaagtccctttcgatctacgccaccttccctctcagggctgatttcttgaatttggggcgtcgaggcctccccacccgttgctaccagcccttttgcagcacttcctgggcaggccaggggagaggacggaaaagtgaaaaaagaacgtgtgcgcccagcggacccgacttaacctgttggtggaggaggaagctggcgtcgggctgaagtcccccgagccacccctggagccagagcagcccccgagcattcagagaaagccgcccgtccccagtcccctcggaagccggtcataaacccgacttctcatcacccgaattacttaaatgagctttgatggtgttaggtccttttccacgtgcggatgactcagcccgctgcagctgcgcccggggaggtgaccctggggcagcggctgaccctgctgcgccctgtaccctggacccagacgcggcccatcccagcagcaccccccgccccaagctcccagaccacacttagctttttttttccccccttactcttcgagtctttttcctcttctctaaaaacattttttttaatttaaaggagttttattacttcttttttttttataaagcatgtgagacagaggctgaatggtagaaacaggctgttaaaaaaagaaaaatacgtgccggtgacgcttcgtggagctggcgagcctcgcctgtcccgcgactgagcttgcggtcgccccgattctctagtagaccctggcgtggggcacctgagatctccgccactgaaaaggcgctatagaaatgcaaggaattatgattttaataaaattgtctcatttaggagcgagcttctgcgctgcctctgtcgtcggagcccgggtttgccacggcaaagtctgtaatcagagaaaaataccagctttgttgagggttagaatatatcattggctaatgtgtgtggttttctttttaaataatgctaagcattggaataattaaagagtgagaaataactcgtctctcctctctcctctccattcagcattgtcttatttaagggcggaaagcgcgcttttcggcagagctggttagtttttaatgcgggctttttttttctcacccgccgttccctccgctccggtctgattcgcaaatccccaaactggcacaaaccgggaaacttgcggccggccgttcttctccccgagttggagacagccctctcctcttccctcccccgcctctgggccctgacccactgcctggtttgcgctagagccgtttaaaaaagaaagaaaggaagaaaggagccgggctctggtaccccgatgccagccgagggcgcgtttcccaggcggcgggctggtgggagagtcaaacccgggtgtggggaagcagcttcgctgcctactctgcatcctctcccctaaaaagaatcaagtatttctagagatcgcctgctcagagggctcagatcccttgtcatattttaaattaaattgaacagttctttctttccagccccatatgcaataggaagagaaaatgcagtcttggagagcccgtcttggcaaccctgtgcccttgatagaagagagagctgcccacttgggctgggcctggcatccagccccagaggagtgctcttgccactggccacagggcctggatttggggaggaagagcagggtccagggccagtggctgagcacggcctggagagatgtgggagttggggaaaggactttttatcagggctgcagaggttcggctctgggctggtggtagggggctggtggtaggcgaggtggctgcggtggcccttccgccaggtgtggggtagaccgcttagaagggaaaggggatcctgaagtgcctgaggaagaaacagcaatgagaaagcaatgggaaaaatgggcaataaatgggcataggggttagtgcccacaggcgctagtggctgtgaagtgcctttgaggtgcaaagggagctttttatgtatttgcttcaggtgtttttcattacatgtgtttcccttttattttccttgttatttggtccttagacttttcagcgatcccttgtattcgtctttttacataagcagaaacttttttttttcctccttagagagatactgtgggaggtattttgccttcagtgctttctctttcctgctttttttaaaatttaattttaaaattataaagtaaatttagtgctagtgaaagtgaggggggaaccagctggggctggagccagggaaggggtaggcagaggcagggttctgcctcccttcctgaggcagccccgccccaggaccctaggcccagcctggtgtcgcttgctcactctctctgctctcttctcttgatgccattctactcccctcaccttcctgcagggttcttgtggacagggatggggacagtgtatcccagtgggtgcccattctccctttgggaacccctggctctgcagagtcattttccttcatgacctacatactgaggccccccattccctgcctgccaggcaagcagggcgagaggaggggcccttgctcccctcagacactaaggctgtttggctttcagctcggcgggtcctgtttgtcccccatacatgccctgttagtctgctaaacccgctgcacagttggttgccctgttgatgggatcagagttgggcaggcatagagagatcacacacacacacacacacacacgcacacgcacacgcactctgcagcagtgaggatgagaggggtttctatttgccacacatttttgtggtcacatgaatagcacactctgctctataacacgtgtatgcacataggtgtttgcatttgatgatactggtgtgacaaggaggtatttctaagccatataaattatgagaactgtatagcttaaaaatttaaggcttgttcagcggtgctgaaaatgtttatttcttaatctgggtggggttacatgggtgtgttcactttgtgaaagtgtatcaagcggcctaacttacagtgtgtgcactttttatacctgccttgcttcagttaaaaagtttacttaaaaaaagaagccccactctcaaaggtaaagaaaaacctgtgcattacaaaatataataaaaatttaaataaaaatttcctccagcctgctttgcttagtccttcctgctaggaatggtgggagggcttgtaaaaaatagcgggctgatataaaagctagcaggcatgtggtccacgaggcatcctgacccgtccacatgtgtggagtgcctgaaaactgcctacagacaggtatagaggtaggattttaacatctcagggctaaaggataagaaatggtgaggagtaagttacttgccaattacattttgctgtcaacatctggaaagcaaaattgcagctgttctctctgcccctgccccccgcccccgcattgccacctcttcttttttttctgcacacttacattttttgtacgcttgccatttatacttcggttttctgcactgttaaaacaattccatggctctgttcaaattgggttgttgggtttgagttttttttttttttttaatggatcttgtagtctgacagtataatttttggagggatttatttaaacaggcccaggagccattgataatcccctcccttttctttcgccctctctgtcttcccagaactgctcaggccagcaatgagggggaggacgctcggcagcccttgccgggctccttcctttagcctctgctcctccgggcaggtactgacagcttcgccctccatggcccttctgtggtgtttttgttttctcttcgccccccaaaaatatttgaaccaaaaagcctcttttttttttcctccacccacagcaaactgaaaggactagtgaaccgtgattcaacagagcgagggcgcctcttttcttccttagcattaattaactcaagttcgttaggacgttgggtctgtcgcccacagttttctcttgtgtgtgctgaatcgggtcatagagggagacttcccgtgcaaacagtttgtgttggagctgaaggacgcagagggggagagagggtgagaaagaaagggagccggggagggacggagcgtggccgaggggtgggcatggtccgagctcctcaaagcacccccggtgtcattctctgcaggggctagacaccagggaaatgtggattcttgggtttcctgggcaatgatcctgataataaaatagttgcgggagcaatacattttgaggaattgaaaaatgacctctttctaactcctaaaattgtacattttggggttctggccactgcctgtggctgaagcaattgcaagaaagaggttccctcaggaccgaggggtgccaggccgatctgagggcaggtggtgaggagaaatccttccttgctccttgtctctcctgtggcgggggaaacagaactggtaaaaaatgaaggggggtgtctggactgatcctgatggagctcttgcagagggactgggaagacctctgccttttgggttttgtcaccttgccctgacccctccgaaggaggggatttgctgtggtgcctggggtgagttttcagcattttgccatttgctctggccttctctctcgacttccagatattttcacagtgtgctgggcacagacctcatcttcacgcgctggtctctctttgccttgccttttgtcactttttcagttcttcttcagaaagagttatgaagctggcctgtgcagttcttccctcttcccgggcccttggccaccatgaagtgacacttcccaagccggttaggtgtgtgaggctctgcacttcccttgcccccggaagcccttccctgtcatctgtccttcacgcacttcggaaggtttcatccccatgcagcctgccggctggagaagagagctttggccttcctggcttttacttctgtttggtgacacaaggaagtttcaagctaaataatgaattaaagagtaggatttttgtttcccattccttgtagaggatgagatgaaagtaaacaatttccagttgccttagagagaatagattgtctcccctaatatccccattcctaccctatattattctgtgccaagagggtaagggagatgtgcctggagcagaggagcatttggagccagaacgaggctgcctgttggcccgatcccaggccaccgctcctggtttgtagtctggaggagaaaaggaaggggcggggggggggggggggcgcggtttacaggagagaagtgtgcggcctggctgtgaggcagaccctgtcctagacccagcactggggtgtggggcgaatccattcagccagcatgaggacactggaaagaaactgcgcagagccgcctttcctgagcagaggaaaacaggcccaagtcagccaaaaacccgctttgtccaaattatccgagctccctcgcaaagtgcattttccggtttccattcctggagtttccagacttttggatgattttgttctgactacagagccccttctcgttggcccccaactgaggggaggccccaccctcctctaggataagcagcagggccccttccctggctgcccagtgctgccgctgcgtcatgtctgcagttcccttcccatctctggccgctgtctggccactgtcttcttgtggccttccacgaagcagcagtaatcttgggacaaggtgggagagctcagggttacgaagccggcttcttttggttcagaccaaggctgaattataaaattccaacaattgggcaaactaattggggccctgtttatggcctttttaatttcccatgtcctttcatacccaggctgcagatatgctttattaaaatggatactggaatatctggtcatttctgtgaagttttgtaagttatttgctctaattgcctgtagttacccagatcaacatgggcccaagtgtccaggatctgaaagaataaatctgggccttaaagccagcaggatgtggacacataggatttttttttttttaagataaagaaggctactaaaagtggccctgtcttaaaatatacaacttcttatgcttctagatgtttcactataggtaggtgcgggcaggttgcaaaacctatctcagtctgggaagattattttgtttccttgaagaatttttaacactgtatatgtgagtgaggtgctgtacatattttcctatttttcttcaaataatccatacaggctcagtggacaggtctgttgtgtagagtttttgaaaaccatgcatttcttctcatggagaagcagtcattttccttaactggtttttctttctctgccgcggtgcagagcccttttctgtcttcttatttttcttcctctgctgttctgtttccctccatctttgtccttctttcttttcagttgtgggcctagcttggcactctctctccaggtttggcttttttctcttttttcgttctccttctctctatttctctttctccgtggccctttcagtctttttctgttgggggtacatttctcctagtgatggctgaaactggcatgggtatgtattttagaaatgtttcagtgaaaactgttgctggttttttttttgtttgtttgttttttttttttttttaccaaatagtactcaacaataaaagacagaggcttttcttccataatggcagcaaaatccctttccacaaaccaaaaacccatatgaatttttaaaaagtcttatttctggcttctcgatgatttttctctccaatgggggaaatacctttcccccacaatgtttcctgcttttccttttttccccccttgtcttttttttttctcttcctattaccagcatcagtggcttcctttccccatttcccatgtccttctactctgtggcctgcatgtccccttgctctttccatcacctgaactcttacacttgccagtgactcagacctggagaagccttgaatcgtatgagggattttttgtcttgattctggtctttggtgcaggatgtaaagcggtctgatctcctgcctggggctggaggggagaagagaaggaggctgggctgggaacaggtaatcttccaacaggagcctccactctttaacaaaagggggacagtttccttttgtctagggctcatgaggggcgtgtctgggctgatggccgccaccagtggcatgcaggaggagggggcccgcagtgaagggtgcttgaaatgtttctaatggaacccgagcaattcctctgtgtgcgcccaaaataggaggggaggaagggagggagggaggaaagagaaatagagaaagagaccttctcatctcccgaagcatcagaatatcctggccactcctccagaaaggcctcctccactgggagccagcagcccatagagagaatggggtgaggggaaagtatttgcctgagaatcttctgcccacctgcaaggttatagccactggcaggagaaggacaattgacaattgttcttcctccaactttctgccctgggaaaggcctgttgcttcttctgttaagagagccttgagggggtgcttggggctctttgtaggtccctgaggctctattgagacactcttctgccgcctctcctctgatctctccgccagtccgtggagttttgacccccaacccctctccaggagccagtcgtgcatcttgtcctgtttccctaacttctacatggatccttccatctgtcatttcccagctgtgggactgttgctgcccccacctctatccctgacccagttgtaccaccagattcagattcaacccatgtcgagcatgtctcttctactgtggcactgtggtctgtgaagtggaacatgccaggattctccaggaggctcgtgttggccattttctgtttggtgtctaatatttagtataaatcagaatacaagaaaaacacctccatgccaaatataaactcacttgtagtttttaatgacctcatcttgactttagaaggtaaaattgtttccacaaggtggagaggcaggatttggtaccttatgtcatgtctctgagctaacatctttggctgattggactgaagctggttattaacatgatgtgaattattggacaccaccctaagaggcctgtctctgataccacctgccttctgtactctcacctctaaccgtttctttcagggatcagccatgagctcagttcacttgagatggataattcagggcacagactggggtcccaggtgttgggcagcccctctcccattgtcagggttcagcgccagcccagggctggatgttttattttggcatgccccaggtgctcttccgggaacctttctgccaacataaaggccacaaagcacagggtttcagttggggaagaaaggggcacgagtgagcagtgaccttttttccgtcgccagctgaggactgagcctcgctgagggagagggcggctgtagggatggggttctgagtggaattggatccctttctccctgtctgcagccacatccttcttcctctgcttttccttttatgtcatatctatttccttcttactgtgtttcgaaggcctcaagcatggctgctccatagctctaactggagagaccccctcagaagtgggactcccctacccagtgctcaccctttctgcttgctgtgaggaaggtccccaagtggaggaccagagcaggggctccccggtgggtcacttctctgtgacttgatttcccccaggtggcctgtttttgatagagccctttgctgttttttgttgtgtcctttcttagctcttttcttttcatttgggtttctcattttatacttttgcactttgcactgctagggtttgggctctttagtctaaattgatttgggagacaggtaagaaaactaatctcaggtcaactggagagggcagatctggagaattaaatgcctgtgcagtggtgaggggcgttggtcagattccttgcctctgctcagaggtagtgtccatctttttgcctttgtcacttctccccgggtctggctgttgtttgtggctgcgtgtagagcttgtcaggcggagtgctgtgacaggaggctattttaataaactgttgcagtttctcgagccgagctgtgttgcgttggcatccctcgtcaccgctaatggagtgtgcgtggctgggtgtgggccgaaggaggaggctgagcttgctgggggctgggggagaagggagggacgtgtggggtgctggcctcccccttgtctgagagtgctccttcagcagccagacctgggggcatcacaaggtggcagtaccctgggcaccagatccctgccctggaagtactgctggcatggacactttctgagctctctttcttcttatttctattcatagcaccgcaggcccgtgtgtatgtggccggggaggaaaacttccactcgcccctgtgtgctccataggaagaaaaaaaaaaagaaagaaagaaatagaaacagaaaaagagagtgtgcaggcccgagagaaagactgaaaccaaaacacagagagaaggcgcagctgcttccccaaggccttctggggctcccgcccgccagcccgccgggagtcaggcctttatttatttatttttcaggcttaaaaaaaaatttcgagtcttccacaatcccagtcccccccaatgccccaccccacccccagatttgctgggtggctgctgccaaatggacccgagtgggagcctggaatgaaaaattcataactgctggactttgcttgttcattagacgtgaacttgtcgattgggcaaattgtttttggtctccaactgccgggggctctccccaccctccctgctcgcccggttccctcctccccttggacgcagccattggctgctcgtggatgtctctttgccaaataggtggatccttctctctctttctctctctctctctctctctctctctgtctctttctccccccacccctttttactggcttggcacaagcaaatggatggggattgagcctgaaaggagagagagagagggagtttgagagagagaaaaggagcaaaaaaaaaaaacaccccaaaaacccaaccagtgcgcacacacacgcgcacactcacacacacgccccatcccatccacgtcctccctcgatcctcgatctctccctcccccccttcttcctttcctccctccctcgctccctctctctcttttgcacgcgtctgccagcaacggtctgcagccggtcagaactcgtcctcttccccgggaatctgcgagctcccccttttcctccgatcaggcagctcgaagtttacacccctgtgccgctgccaaagccgaaagcctttttcttcagctgccgctttttccctcctgggttttgtttttgtttttgttttgcacgggggtggggtggggtgcgttgttggttgtggggagatggtgggaggctggttttgatttttaaattttgcatttttttctttttttttttttttaaactggaagaggatgcacaggggaagaaattgaaaaaaaaattttgttggcttttgtttacctggcgtgtgtggcagccggctcgctccctctctctgcttgctatccctgacctttctttctttttgctccttttcaaaaaaaatattaatttcccccttctgtgcaatggagcatggggggggggaggagggggaagggtttgagaatccacccaagcccggcccctattccccagaacaccaataataaccccctttaaaacatttaccttcctcccctgctcctcctcctcccccctccccccacccgcccccaactcacaactcttttgagtccagaatctcagaatcgggcgttgggctttgccgggtgcttcagatcaatggtaattatttaattttttccagttttatttttgtaaacagaaatcaattattatttaaacttcaaacaagcaaacaaccaaaaaaaaaaaaaaaaaccaaacaaaaccgagagagcccatccttctgtcacctgactgagtgggaaaaagggtgaaggggttgtgggaggctggggaaggggtcgcaagaagacccatgtagcttttaaccctaatgtggccgagacaagcaccttatttgtgctaacaagaagtgttttgttcattattactgtgattaacattagtattggtgtcgataacaaagctgaaatcacatatttaggatttaggtctgattaaaaaatgttggggtggatgttccaactggatcaggagaaaagaaaatgaaaacagcctggggagagggaagcctgatctgtttcctcactcgcttgctcgtggatgtcattttctgtcttcttgggggcggccaaaaatcgaccggtgtcggggaccagaggcggccccgcacgcccccgcgtgtgcgtccacgggcgtctgtgcagacggacactgtgccggggcgagctgacaggagttcacggctgcgatagaacatggagatgtcatgggcgcgacagagcctggcggggataccagcagcgtgtgtgtgtggacggcaacgttgtctgtgcgcgtgtgtgtgagtgagtgagggagagagagagagaataggtgtgtgtagaggctcccggtgcctctgtctggctgctgaggctgagatgggagcaagtggctggcgaagctggtggtggcttcaaaccacactttcgtagaacaatcgcaagagaaaattgttggggggagggaggaggaggagaaggcggttttccttgtgcccccccttctaacgctgcttttctccttctctctttccccctcatcccgtcttcccctcctcccgtcctccctcgccccgcatgctcccggcttgccgcctgcaggatgagttccacccgttcatcgaggcactgctgcctcacgtccgcgctttctcctacacctggttcaacctgcaggcgcggaagcgcaagtacttcaagaagcatgaaaagcggatgtcgaaggacgaggagcgggcggtgaaggacgagctgctgggcgagaagcccgagatcaagcagaagtgggcatcccggctgctggccaagctgcgcaaggacatccggcccgagttccgcgaggacttcgtgctgaccatcacgggcaagaagcccccctgctgcgtgctctccaaccccgaccagaagggcaagatccggcggattgactgcctgcgccaggctgacaaggtgtggcggctggacctggtcatggtgattttgtttaaggggatccccctggaaagtactgatggggagcggctctacaagtcgcctcagtgctcgaaccccggcctgtgcgtccagccacatcacattggagtcacaatcaaagaactggatctttatctggcttactttgtccacactccgggtaggtcgttctcaaccatttttccctctcattttattttccttgctggcatttgttctgtttattgttcctctaatttccaagcgataactcgccatgggcctaactggtgtatgcccgtcctgcggggcctgcaacacggttctatgggcccttttcctttttcctgtcttctgtctcccccgacctgttctattcttcctcctctgccccctggccatggtatcgactttgtgcatctccatctttggaggacttatctgatcagaaagatgctgcaggtcttaggattggggacatgatgcccccagaattatccatgatggtgagagtttgagatgaacaacaacagcaaaccagtaattgctcttattaaaatgagtcagaagaagtattgaggggcaggtgctagttttactgcagcttcacctccagtcccaggaaaaactgggtttggtacaagcgggatgggcaggagtccggtggagagaaggggcatgtgaaaccctgggatatgagactgaatgaacagaaaagaggagagaagacagtagtgggcagattctgtggcctaaatactcaggcg
